(19) United States
(12) Patent Application Publication
(10) Pub. No.: US 2012/0045809 A1
(43) Pub. Date: Feb. 23, 2012

(54) Engineered Microorganisms for the Production of One or More Target Compounds

(75) Inventors: Thomas Buelter, Denver, CO (US); Peter Meinhold, Denver, CO (US); Christopher Smith, Englewood, CO (US); Aristos Aristidou, Highlands Ranch, CO (US); Catherine Asleson Dundon, Englewood, CO (US); Jun Urano, Aurora, CO (US)

(73) Assignee: GEVO, INC., Englewood, CO (US)

(21) Appl. No.: 13/141,648

(22) PCT Filed: Dec. 23, 2009
(86) PCT No.: PCT/US2009/069390

§ 371 Date: Oct. 14, 2011

Related U.S. Application Data
(60) Provisional application No. 61/140,611, filed on Dec. 23, 2008.
(60) Provisional application No. 61/213,918, filed on Jul. 29, 2009.
(60) Provisional application No. 61/213,919, filed on Jul. 29, 2009.

(51) Int. Cl. C12P 7/16; C12N 1/19

(52) U.S. Cl. 435/160; 435/254.2

(57) ABSTRACT

The present invention provides recombinant microorganisms comprising an isobutanol producing metabolic pathway and methods of using said recombinant microorganisms to produce isobutanol. In various aspects of the invention, the recombinant microorganisms comprise isobutanol producing metabolic pathway with one or more isobutanol pathway enzymes localized in the mitochondria. In various embodiments described herein, the recombinant microorganisms may be Crabtree-negative yeast microorganisms, microorganisms of the Saccharomyces clade, Crabtree-positive yeast microorganisms, post-WGD (whole genome duplication) yeast microorganisms, pre-WGD (whole genome duplication) yeast microorganisms, and non-fermenting yeast microorganisms.

### CROSS-REFERENCE TO RELATED APPLICATIONS

[0001] This application claims priority to U.S. Provisional Application Ser. No. 61/140,611, filed Dec. 23, 2008, U.S. Provisional Application Ser. No. 61/213,918, filed Jul. 29, 2009, and U.S. Provisional Application Ser. No. 61/213,919, filed Jul. 29, 2009, each of which are hereby incorporated by reference in their entireties for all purposes.

### TECHNICAL FIELD

[0002] The invention is generally related to metabolically engineered microorganisms and methods of their use for the production of beneficial metabolites including C3-C5 alcohols such as isobutanol.

### BACKGROUND

[0003] Biofuels have a long history ranging back to the beginning of the 20th century. As early as 1900, Rudolf Diesel demonstrated at the World Exhibition in Paris, France, an engine running on peanut oil. Soon thereafter, Henry Ford demonstrated his Model T running on ethanol derived from corn. Petroleum-derived fuels displaced biofuels in the 1930s and 1940s due to increased supply, and efficiency at a lower cost.

[0004] Market fluctuations in the 1970s coupled to the decrease in US oil production led to an increase in crude oil prices and a renewed interest in biofuels. Today, many interest groups, including policy makers, industry planners, aware citizens, and the financial community, are interested in substituting petroleum-derived fuels with biomass-derived biofuels. The leading motivations for developing biofuels are of economical, political, and environmental nature.

[0005] One is the threat of ‘peak oil’, the point at which the consumption rate of crude oil exceeds the supply rate, thus leading to significantly increased fuel cost results in an increased demand for alternative fuels. In addition, instability in the Middle East and other oil-rich regions has increased the demand for domestically produced biofuels. Also, environmental concerns relating to the possibility of carbon dioxide related climate change is an important social and ethical driving force which is starting to result in government regulations and policies such as caps on carbon dioxide emissions from automobiles, taxes on carbon dioxide emissions, and tax incentives for the use of biofuels.

[0006] Ethanol is the most abundant fermentatively produced fuel today but has several drawbacks when compared to gasoline. Butanol, in comparison, has several advantages over ethanol as a fuel: it can be made from the same feedstocks as ethanol but, unlike ethanol, it is compatible with gasoline at any ratio and can also be used as a pure fuel in existing combustion engines without modifications. Unlike ethanol, butanol does not absorb water and can thus be stored and distributed in the existing petrochemical infrastructure. Due to its higher energy content which is close to that of gasoline, the fuel economy (miles per gallon) is better than that of ethanol. Also, butanol-gasoline blends have lower vapor pressure than ethanol-gasoline blends, which is important in reducing evaporative hydrocarbon emissions.

[0007] Isobutanol has the same advantages as butanol with the additional advantage of having a higher octane number due to its branched carbon chain. Isobutanol is also useful as a commodity chemical and is also a precursor to MTBE. Isobutanol can be produced in microorganisms expressing a heterologous metabolic pathway, but these microorganisms are not of commercial relevance due to their inherent low performance characteristics, which include low productivity, low titer, low yield, and the requirement for oxygen during the fermentation process.

[0008] The present inventors have overcome these problems by developing metabolically engineered microorganisms that exhibit increased isobutanol productivity, titer, and/or yield.

### SUMMARY OF THE INVENTION

[0009] The present invention provides recombinant microorganisms that comprise an isobutanol producing metabolic pathway and methods of using said recombinant microorganisms to produce isobutanol.

[0010] In a first aspect, the invention provides recombinant microorganisms comprising an isobutanol producing metabolic pathway. In one embodiment, the isobutanol producing metabolic pathway comprises enzymes catalyzing the conversions (a-e): a) pyruvate to acetolactate; b) acetolactate to dihydroxyisovalerate; c) dihydroxy isovalerate to ketoisovalerate; d) ketoisovalerate to isobutyraldehyde; and e) isobutyraldehyde to isobutanol. In another embodiment, the isobutanol producing metabolic pathway comprises at least one of the enzymes selected from (a-f): a) acetolactate synthase (ALS); b) ketolacid reductoisomerase (KARI); c) dihydroxy acid dehydratese (DHAD); d) ketoisovalerate decarboxylase (KIVD); e) alcohol dehydrogenase (ADH); and f) branched chain amino acid aminotransferase.

[0011] In one embodiment, the recombinant microorganisms of the present invention comprise an isobutanol producing metabolic pathway with at least one isobutanol pathway enzyme localized in the mitochondria. In another embodiment, the recombinant microorganisms comprise an isobutanol producing metabolic pathway with at least two isobutanol pathway enzymes localized in the mitochondria. In another embodiment, the recombinant microorganisms comprise an isobutanol producing metabolic pathway with at least three isobutanol pathway enzymes localized in the mitochondria. In another embodiment, the recombinant microorganisms comprise an isobutanol producing metabolic pathway with at least four isobutanol pathway enzymes localized in the mitochondria. In yet another embodiment, the recombinant microorganisms comprise an isobutanol producing metabolic pathway with five isobutanol pathway enzymes localized in the mitochondria.

[0012] In one embodiment, the present invention provides a recombinant eukaryotic microorganism capable of producing isobutanol from a carbon source, said recombinant eukaryotic microorganism comprising an isobutanol producing metabolic pathway, wherein said metabolic pathway comprises enzymes catalyzing the conversions (a-e): a) pyruvate to acetolactate; b) acetolactate to dihydroxyisovalerate; c) dihydroxy isovalerate to ketoisovalerate; d) ketoisovalerate to isobutyraldehyde; and e) isobutyraldehyde to isobutanol, and wherein at least one of the conversions (a-e) occurs in the mitochondria. In one embodiment, the conversion is (a) pyruvate to acetolactate. In one embodiment, at least two of the conversions (a-e) occur in the mitochondria. In another embodiment, at least three of the conversions (a-e) occur in the mitochondria. In another embodiment, at least four of the conversions (a-e) occur in the mitochondria. In yet another embodiment, all five of the conversions (a-e) occur in the mitochondria.

[0013] In another embodiment, the present invention provides a recombinant eukaryotic microorganism capable of producing isobutanol from a carbon source, said recombinant eukaryotic microorganism comprising an isobutanol producing metabolic pathway, wherein said metabolic pathway comprises at least one of the enzymes selected from (a-f): a) acetolactate synthase (ALS); b) ketolacid reductoisomerase (KARI); c) dihydroxy acid dehydratese (DHAD); d) ketoisovalerate decarboxylase (KIVD); e) alcohol dehydrogenase (ADH); and a f) branched chain amino acid aminotransferase, and wherein at least one of the enzymes (a-f) is overexpressed and targeted to the mitochondria. In one embodiment, the enzyme is ALS. In one embodiment, at least two of the enzymes (a-f) are overexpressed and targeted to the mitochondria. In another embodiment, at least three of the enzymes (a-f) are overexpressed and targeted to the mitochondria. In another embodiment, at least four of the enzymes (a-f) are overexpressed and targeted to the mitochondria. In yet another embodiment, five of the enzymes are overexpressed and targeted to the mitochondria.

[0014] In another embodiment, the present invention provides methods of producing isobutanol using one or more recombinant microorganisms of the invention. In one embodiment, the method includes cultivating one or more recombinant microorganisms in a culture medium containing a feedstock providing the carbon source until a recoverable quantity of the isobutanol is produced and optionally, recovering the isobutanol. In one embodiment, the microorganism is selected to produce isobutanol from a carbon source at a yield of at least about 5 percent theoretical. In another embodiment, the microorganism is selected to produce isobutanol at a yield of at least about 10 percent, at least about 15 percent, about least about 20 percent, at least about 25 percent, at least about 30 percent, at least about 35 percent, at least about 40 percent, at least about 45 percent, at least about 50 percent, at least about 55 percent, at least about 60 percent, at least about 65 percent, at least about 70 percent, at least about 75 percent, or at least about 80 percent theoretical.

[0015] In one embodiment, the recombinant microorganisms of the invention produce isobutanol at a specific productivity of at least about 0.003 g/L/h/OD. In another embodiment, the microorganism produces isobutanol at a specific productivity of at least about 0.006 g/L/h/OD, at least about 0.009 g/L/h/OD, at least about 0.012 g/L/h/OD, at least about 0.015 g/L/h/OD, or at least about 0.020 g/L/h/OD.

[0016] In one embodiment, the recombinant microorganisms of the invention produce isobutanol at a titer of at least about 2.7 g/L. In another embodiment, the microorganism produces isobutanol at a total titer of at least about 4 g/L, at least about 6 g/L, at least about 8 g/L, at least about 10 g/L, or at least about 12 g/L.

[0017] In one embodiment, the recombinant microorganisms of the invention produce isobutanol at a total titer of at least about 21 g/L. In another embodiment, the microorganism produces isobutanol at a total titer of at least about 25 g/L, at least about 30 g/L, at least about 35 g/L, at least about 40 g/L, or at least about 50 g/L.

[0018] In one embodiment, the present invention provides a method of producing isobutanol, comprising the steps of (a) providing a recombinant microorganism comprising an isobutanol producing metabolic pathway with at least one isobutanol pathway enzyme localized in the mitochondria, wherein said recombinant microorganism is selected to produce isobutanol from a carbon source at a yield of at least about 5 percent theoretical; (b) cultivating said recombinant microorganism in a culture medium containing a feedstock providing the carbon source until a recoverable quantity of isobutanol is produced; and (c) recovering the isobutanol.

[0019] In another embodiment, the present invention provides a method of producing isobutanol, comprising the steps of (a) providing a recombinant microorganism comprising: (i) an isobutanol producing metabolic pathway with at least one isobutanol pathway enzyme localized in the mitochondria, wherein said recombinant microorganism is selected to produce isobutanol from a carbon source; and a (ii) metabolic pathway for the conversion of a carbon source to isobutanol which is at least partially balanced with respect to cofactor usage; (b) cultivating said recombinant microorganism in a culture medium containing a feedstock providing the carbon source until a recoverable quantity of isobutanol is produced; and (c) recovering the isobutanol.

[0020] In various embodiments described herein, the isobutanol pathway enzyme(s) is/are selected from the group consisting of acetolactate synthase (ALS), ketol-acid reductoisomerase (KARI), dihydroxyacid dehydratase (DHAD), 2-keto-acid decarboxylase (KIVD), and isobutyraldehyde dehydrogenase (IDH).

[0021] In some embodiments, the present invention provides recombinant microorganisms that have been engineered to express a heterologous metabolic pathway for conversion of pyruvate to isobutanol. In one embodiment, the recombinant microorganism is further engineered to increase the activity of a native metabolic pathway for conversion of pyruvate to isobutanol. In another embodiment, the recombinant microorganism is further engineered to include at least one enzyme encoded by a heterologous gene and at least one enzyme encoded by a native gene. In yet another embodiment, the recombinant microorganism is selected to include a native metabolic pathway for conversion of pyruvate to isobutanol. In yet another embodiment, the recombinant microorganism comprises a reduction in the activity of a native metabolic pathway as compared to a parental microorganism. In various embodiments described herein, one or more of the enzymes catalyzing the conversion of pyruvate to isobutanol is/are localized in the mitochondria.

[0022] In another embodiment, the microorganism may further be engineered to overexpress the BAT1 gene, BAT2 gene, or both the BAT1 and BAT2 genes.

[0023] In another embodiment, the recombinant microorganisms of the present invention may further be engineered to reduce ethanol production. In one embodiment, the recombinant microorganism may be further engineered to eliminate ethanol production. In one embodiment, the recombinant microorganism may further be engineered to include reduced pyruvate decarboxylase (PDC) activity as compared to a parental microorganism. In one embodiment, PDC activity is eliminated. PDC catalyzes the decarboxylation of pyruvate to acetaldehyde, which is reduced to ethanol by alcohol dehydrogenases via the oxidation of NADH to NAD+. In one embodiment, the recombinant microorganism includes a mutation in at least one PDC gene resulting in a reduction of PDC activity of a polypeptide encoded by said gene. In another embodiment, the recombinant microorganism includes a partial deletion of a PDC gene resulting in a reduction of PDC activity of a polypeptide encoded by said gene. In another embodiment, the recombinant microorganism comprises a complete deletion of a PDC gene resulting in a reduction of PDC activity of a polypeptide encoded by said gene. In yet another embodiment, the recombinant microorganism includes a modification of the regulatory region associated with at least one PDC gene resulting in a reduction of PDC activity of a polypeptide encoded by said gene. In yet another embodiment, the recombinant microorganism comprises a modification of the transcriptional regulator resulting in a reduction of PDC gene transcription. In yet another embodiment, the recombinant microorganism comprises mutations in all PDC genes resulting in a reduction of PDC activity of the polypeptides encoded by said genes.

[0024] In another embodiment, the recombinant microorganisms of the present invention may further be engineered to reduce glycerol production. In one embodiment the recombinant microorganism may be further engineered to eliminate glycerol production. In one embodiment, the recombinant microorganism may further be engineered to include reduced glycerol-3-phosphate dehydrogenase (GPD) activity as compared to a parental microorganism. In one embodiment, GPD activity is eliminated. GPD catalyzes the reduction of dihydroxyacetone phosphate (DHAP) to glycerol-3-phosphate (G3P) via the oxidation of NADH to NAD+. Glycerol is produced from G3P by Glycerol-3-phosphatase (GPP). In one embodiment, the recombinant microorganism includes a mutation in at least one GPD gene resulting in a reduction of GPD activity of a polypeptide encoded by said gene. In another embodiment, the recombinant microorganism includes a partial deletion of a GPD gene resulting in a reduction of GPD activity of a polypeptide encoded by the gene. In another embodiment, the recombinant microorganism comprises a complete deletion of a GPD gene resulting in a reduction of GPD activity of a polypeptide encoded by the gene. In yet another embodiment, the recombinant microorganism includes a modification of the regulatory region associated with at least one GPD gene resulting in a reduction of GPD activity of a polypeptide encoded by said gene. In yet another embodiment, the recombinant microorganism comprises a modification of the transcriptional regulator resulting in a reduction of GPD gene transcription. In yet another embodiment, the recombinant microorganism comprises mutations in all GPD genes resulting in a reduction of GPD activity of a polypeptide encoded by the gene.

[0025] In another embodiment, the recombinant microorganism is engineered with an isobutanol producing metabolic pathway that is at least partially balanced with respect to cofactor usage. In one embodiment, the isobutanol producing metabolic pathway is partially balanced with respect to cofactor usage by providing an NADH dependent alcohol dehydrogenase (ADH). In one embodiment, the NADH dependent ADH is encoded by DmADH from Drosophila melanogaster. In one embodiment, the NADH dependent ADH is encoded by adhA from Lactococcus lactis. In another embodiment, the isobutanol producing metabolic pathway is partially balanced with respect to cofactor usage by providing an NADH dependent ketol-acid reductoisomerase (KARI). In one embodiment, said KARI is engineered to have increased activity using NADH as the cofactor as compared to the S. cerevisiae Ilv5 protein and E. coli YqhD protein, respectively. In one embodiment, the NADH dependent KARI is encoded by EcilvCcoSc^{P2D1-A1-his6}.

[0026] In another embodiment, the recombinant microorganism is engineered with an isobutanol producing metabolic pathway that is balanced with respect to cofactor usage. In one embodiment, said metabolic pathway is balanced by providing an NADH dependent pathway for the conversion of pyruvate to isobutanol comprising an NADH dependent KARI enzyme and an NADH dependent ADH enzyme. In one embodiment, said KARI and said ADH are engineered to have increased activity using NADH as the cofactor as compared to the S. cerevisiae Ilv5 protein and E. coli YqhD protein, respectively. In another embodiment, said KARI and said ADH are identified in nature with increased activity using NADH as the cofactor as compared to the S. cerevisiae Ilv5 protein and E. coli YqhD protein, respectively.

[0027] In one embodiment, the metabolic pathway is balanced with respect to cofactor usage. In some embodiments, the metabolic pathway is balanced with respect to cofactor usage by the malate pathway. In additional embodiments, the metabolic pathway is balanced with respect to cofactor usage by the expression of a transhydrogenase. In some embodiments, the transhydrogenase is overexpressed. In one embodiment, the transhydrogenase is localized to the cytoplasmic membrane. In another embodiment, the transhydrogenase is localized to the mitochondrial membrane. In yet another embodiment, the transhydrogenase is localized to the mitochondrial membrane and the cytoplasmic membrane. In one embodiment, the transhydrogenase is a bacterial membrane bound transhydrogenase. In another embodiment, the transhydrogenase is a mammalian transhydrogenase. In yet another embodiment, the transhydrogenase is a fungal transhydrogenase. In an exemplary embodiment, the fungal transhydrogenase is derived from Neurospora crassa (GI:164426165).

[0028] In one embodiment, the metabolic pathway is balanced with respect to cofactor usage by providing an NADH dependent ADH and by the malate pathway. In another embodiment, the metabolic pathway is balanced with respect to cofactor usage by providing an NADH dependent ADH and the expression of a transhydrogenase.

[0029] In another embodiment, the recombinant microorganisms are further engineered to grow on glucose independently of C2-compounds at a growth rate substantially equivalent to the growth rate of a parental microorganism without altered PDC activity.

[0030] In various embodiments described herein, the microorganisms of the invention may produce isobutanol anaerobically under anaerobic conditions at a rate of at least about 10-fold higher than a parental microorganism comprising a native or unmodified metabolic pathway.

[0031] In another embodiment, the recombinant microorganism further comprises a pathway for the fermentation of isobutanol from a pentose sugar. In one embodiment, the pentose sugar is xylose. In one embodiment, the recombinant microorganism is engineered to express a functional xylose isomerase (XI). In another embodiment, the recombinant microorganism further comprises a deletion or disruption of a native gene encoding for an enzyme that catalyzes the conversion of xylose to xylitol. In one embodiment, the native gene is xylose reductase (XR). In another embodiment, the native gene is xylitol dehydrogenase (XDH). In yet another embodiment, both native genes are deleted or disrupted. In yet another embodiment, the recombinant microorganism further is engineered to overexpress either a heterologous or native gene encoding for an enzyme that catalyzes the conversion of xylulose to xylulose-5-phosphate.

[0032] In various embodiments described herein, the recombinant microorganisms may be microorganisms of the Saccharomyces clade, Saccharomyces sensu stricto group microorganisms, Crabtree-negative yeast microorganisms, Crabtree-positive yeast microorganisms, post-WGD (whole genome duplication) yeast microorganisms, pre-WGD (whole genome duplication) yeast microorganisms, and non-fermenting yeast microorganisms.

[0033] In some embodiments, the methods of the present invention utilize a yeast recombinant microorganism of the Saccharomyces clade.

[0034] In some embodiments, the methods of the present invention utilize a yeast recombinant microorganism of the Saccharomyces sensu stricto group.

[0035] In some embodiments, the methods of the present invention utilize a Crabtree-negative recombinant yeast microorganism. In one embodiment, the Crabtree-negative yeast microorganism is classified into a genera selected from the group consisting of Kluyveromyces, Pichia, Hansenula, or Candida. In additional embodiments, the Crabtree-negative yeast microorganism is selected from Kluyveromyces lactis, Kluyveromyces marxianus, Pichia anomala, Pichia stipitis, Pichia kudriavzevii, Hanensula anomala, Candida utilis and Kluyveromyces waltii.

[0036] In some embodiments, the methods of the present invention utilize a Crabtree-positive recombinant yeast microorganism. In one embodiment, the Crabtree-positive yeast microorganism is classified into a genera selected from the group consisting of Saccharomyces, Kluyveromyces, Zygosaccharomyces, Debaryomyces, Candida, Pichia and Schizosaccharomyces. In additional embodiments, the Crabtree-positive yeast microorganism is selected from the group consisting of Saccharomyces cerevisiae, Saccharomyces uvarum, Saccharomyces bayanus, Saccharomyces paradoxus, Saccharomyces castelli, Saccharomyces kluyveri, Kluyveromyces thermotolerans, Candida glabrata, Z. bailli, Z. rouxii, Debaryomyces hansenii, Pichia pastorius, Schizosaccharomyces pombe, and Saccharomyces uvarum.

[0037] In some embodiments, the methods of the present invention utilize a post-WGD (whole genome duplication) yeast recombinant microorganism. In one embodiment, the post-WGD yeast recombinant microorganism is classified into a genera selected from the group consisting of Saccharomyces or Candida. In additional embodiments, the post-WGD yeast is selected from the group consisting of Saccharomyces cerevisiae, Saccharomyces uvarum, Saccharomyces bayanus, Saccharomyces paradoxus, Saccharomyces castelli, and Candida glabrata.

[0038] In some embodiments, the methods of the present invention utilize a pre-WGD (whole genome duplication) yeast recombinant microorganism. In one embodiment, the pre-WGD yeast recombinant microorganism is classified into a genera selected from the group consisting of Saccharomyces, Kluyveromyces, Candida, Pichia, Debaryomyces, Hansenula, Pachysolen, Yarrowia and Schizosaccharomyces. In additional embodiments, the pre-WGD yeast is selected from the group consisting of Saccharomyces kluyveri, Kluyveromyces thermotolerans, Kluyveromyces marxianus, Kluyveromyces waltii, Kluyveromyces lactis, Candida tropicalis, Pichia pastoris, Pichia anomala, Pichia stipitis, Pichia kudriavzevii, Debaryomyces hansenii, Hansenula anomala, Pachysolen tannophilis, Yarrowia lipolytica, and Schizosaccharomyces pombe.

[0039] In some embodiments, the methods of the present invention utilize a microorganism that is a non-fermenting yeast microorganism, including, but not limited to those, classified into a genera selected from the group consisting of Tricosporon, Rhodotorula, or Myxozyma.

### BRIEF DESCRIPTION OF THE DRAWINGS

[0040] Illustrative embodiments of the invention are illustrated in the drawings, in which:

[0041] FIG. 1 illustrates an exemplary metabolic pathway for the conversion of glucose to isobutanol via pyruvate.

[0042] FIG. 2 illustrates an exemplary metabolic pathway for the mitochondrial conversion of glucose to isobutanol via pyruvate.

[0043] FIG. 3 illustrates the cofactor balance of an isobutanol producing yeast strain achieved by use of NADH dependent KARI and ADH.

[0044] FIG. 4 illustrates the cofactor balance of an isobutanol producing yeast strain achieved by use of NADH dependent KARI and ADH.

[0045] FIG. 5 illustrates the cofactor balance of an isobutanol producing yeast strain achieved by use of the malate bypass.

[0046] FIG. 6 illustrates the cofactor balance of an isobutanol producing yeast strain achieved by use of the malate bypass and a NADH dependent ADH.

[0047] FIG. 7 illustrates the cofactor balance of an isobutanol producing yeast strain achieved by use of a transhydrogenase.

[0048] FIG. 8 illustrates the cofactor balance of an isobutanol producing yeast strain achieved by use of a transhydrogenase and a NADH dependent ADH.

[0049] FIG. 9 illustrates the results of fermentations using GEVO2062 and GEVO2072. Shown are isobutanol production, ethanol production, glucose consumption, and cell density (OD₆₀₀) over time. Shown are the averages and standard deviations of three replicate shake flasks for each strain.

[0050] FIG. 10 illustrates a proposed mitochondrial/cytosolic isobutanol pathway.

[0051] FIG. 11 shows the isobutanol production of four GEVO2072 transformant combinations.

[0052] FIGS. 12a-b illustrate titers of isobutanol (a) and (b) ethanol during shake flask fermentation experiments with GEVO1947 and eight transformants, including GEVO2087 (Transformant #10) and GEVO2088 (Transformant #7).

[0053] FIGS. 13a-b illustrate the production of (a) isobutanol and (b) ethanol in GEVO2087 and GEVO2072 compared to the negative control strains, GEVO1947 and GEVO1186, respectively.

[0054] FIG. 14 shows the isobutanol production in fermentations using GEVO2087, GEVO1969, GEVO2276, and GEVO2277. Isobutanol was measured after 0, 4.5, 8, 24, 49.5, and 71 hours incubation. The strains were GEVO2087 (PDC+, PATHWAY+), GEVO1969 (Pdc-minus, PATHWAY−), GEVO2276 (Pdc-minus, PATHWAY+, BsalsS-minus), and GEVO2277 (PDC+, PATHWAY+). The values are volume corrected.

### DETAILED DESCRIPTION

### Definitions

[0055] As used herein and in the appended claims, the singular forms “a,” “an,” and “the” include plural referents unless the context clearly dictates otherwise. Thus, for example, reference to “a polynucleotide” includes a plurality of such polynucleotides and reference to “the microorganism” includes reference to one or more microorganisms, and so forth.

[0056] Unless defined otherwise, all technical and scientific terms used herein have the same meaning as commonly understood to one of ordinary skill in the art to which this disclosure belongs. Although methods and materials similar or equivalent to those described herein can be used in the practice of the disclosed methods and compositions, the exemplary methods, devices and materials are described herein.

[0057] Any publications discussed above and throughout the text are provided solely for their disclosure prior to the filing date of the present application. Nothing herein is to be construed as an admission that the inventors are not entitled to antedate such disclosure by virtue of prior disclosure.

[0058] The term “microorganism” includes prokaryotic and eukaryotic microbial species from the Domains Archaea, Bacteria and Eucarya, the latter including yeast and filamentous fungi, protozoa, algae, or higher Protista. The terms “microbial cells” and “microbes” are used interchangeably with the term microorganism. The term “prokaryotes” is art recognized and refers to cells which contain no nucleus or other cell organelles. The prokaryotes are generally classified in one of two domains, the Bacteria and the Archaea. The definitive difference between organisms of the Archaea and Bacteria domains is based on fundamental differences in the nucleotide base sequence in the 16S ribosomal RNA.

[0059] The term “algae” means a eukaryotic microorganism that contains a chloroplast, and optionally that is capable of performing photosynthesis, or a prokaryotic microorganism capable of performing photosynthesis. Algae include obligate photoautotrophs, which cannot metabolize a fixed carbon source as energy, as well as heterotrophs, which can live solely off of a fixed carbon source. Algae can refer to unicellular organisms that separate from sister cells shortly after cell division, such as Chlamydomonas, and can also refer to microorganisms such as, for example, Volvox, which is a simple multicellular photosynthetic microbe of two distinct cell types. “Algae” can also refer to cells such as Chlorella and Dunaliella. “Algae” also includes other photosynthetic microorganisms that exhibit cell-cell adhesion, such as Agmenellum, Anabaena, and Pyrobotrys. “Algae” also includes obligate heterotrophic microorganisms that have lost the ability to perform photosynthesis, such as certain dinoflagellate algae species.

[0060] The term “Archaea” refers to a categorization of organisms of the division Mendosicutes, typically found in unusual environments and distinguished from the rest of the prokaryotes by several criteria, including the number of ribosomal proteins and the lack of muramic acid in cell walls. On the basis of ssrRNA analysis, the Archaea consist of two phylogenetically-distinct groups: Crenarchaeota and Euryarchaeota. On the basis of their physiology, the Archaea can be organized into three types: methanogens (prokaryotes that produce methane); extreme halophiles (prokaryotes that live at very high concentrations of salt (NaCl); and extreme (hyper) thermophilus (prokaryotes that live at very high temperatures). Besides the unifying archaeal features that distinguish them from Bacteria (i.e., no murein in cell wall, ester-linked membrane lipids, etc.), these prokaryotes exhibit unique structural or biochemical attributes which adapt them to their particular habitats. The Crenarchaeota consists mainly of hyperthermophilic sulfur-dependent prokaryotes and the Euryarchaeota contains the methanogens and extreme halophiles.

[0061] “Bacteria” or “eubacteria” refers to a domain of prokaryotic organisms. Bacteria include at least 11 distinct groups as follows: (1) Gram-positive (gram+) bacteria, of which there are two major subdivisions: (1) high G+C group (Actinomycetes, Mycobacteria, Micrococcus, others) (2) low G+C group (Bacillus, Clostridia, Lactobacillus, Staphylococci, Streptococci, Mycoplasmas); (2) Proteobacteria, e.g., Purple photosynthetic+non-photosynthetic Gram-negative bacteria (includes most “common” Gram-negative bacteria); (3) Cyanobacteria, e.g., oxygenic phototrophs; (4) Spirochetes and related species; (5) Planctomyces; (6) Bacteroides, Flavobacteria; (7) Chlamydia; (8) Green sulfur bacteria; (9) Green non-sulfur bacteria (also anaerobic phototrophs); (10) Radioresistant micrococci and relatives; (11) Thermotoga and Thermosipho thermophiles.

[0062] “Gram-negative bacteria” include cocci, nonenteric rods, and enteric rods. The genera of Gram-negative bacteria include, for example, Neisseria, Spirillum, Pasteurella, Brucella, Yersinia, Francisella, Haemophilus, Bordetella, Escherichia, Salmonella, Shigella, Klebsiella, Proteus, Vibrio, Pseudomonas, Bacteroides, Acetobacter, Aerobacter, Agrobacterium, Azotobacter, Spirilla, Serratia, Vibrio, Rhizobium, Chlamydia, Rickettsia, Treponema, and Fusobacterium.

[0063] “Gram positive bacteria” include cocci, nonsporulating rods, and sporulating rods. The genera of gram positive bacteria include, for example, Actinomyces, Bacillus, Clostridium, Corynebacterium, Erysipelothrix, Lactobacillus, Listeria, Mycobacterium, Myxococcus, Nocardia, Staphylococcus, Streptococcus, and Streptomyces.

[0064] The term “genus” is defined as a taxonomic group of related species according to the Taxonomic Outline of Bacteria and Archaea (Garrity, G. M., Lilburn, T. G., Cole, J. R., Harrison, S. H., Euzeby, J., and Tindall, B. J. (2007) The Taxonomic Outline of Bacteria and Archaea. TOBA Release 7.7, March 2007. Michigan State University Board of Trustees. [http://www.taxonomicoutline.org/]).

[0065] The term “species” is defined as a collection of closely related organisms with greater than 97% 16S ribosomal RNA sequence homology and greater than 70% genomic hybridization and sufficiently different from all other organisms so as to be recognized as a distinct unit.

[0066] The term “recombinant microorganism” and “recombinant host cell” are used interchangeably herein and refer to microorganisms that have been genetically modified to express or over-express endogenous polynucleotides, or to express heterologous polynucleotides, such as those included in a vector, or which have a reduction in expression of an endogenous gene. The polynucleotide generally encodes a target enzyme involved in a metabolic pathway for producing a desired metabolite. It is understood that the terms “recombinant microorganism” and “recombinant host cell” refer not only to the particular recombinant microorganism but to the progeny or potential progeny of such a microorganism. Because certain modifications may occur in succeeding generations due to either mutation or environmental influences, such progeny may not, in fact, be identical to the parent cell, but are still included within the scope of the term as used herein.

[0067] The term “wild-type microorganism” describes a cell that occurs in nature, i.e. a cell that has not been genetically modified. A wild-type microorganism can be genetically modified to express or overexpress a first target enzyme. This microorganism can act as a parental microorganism in the generation of a microorganism modified to express or overexpress a second target enzyme. In turn, the microorganism modified to express or overexpress a first and a second target enzyme can be modified to express or overexpress a third target enzyme.

[0068] Accordingly, a “parental microorganism” functions as a reference cell for successive genetic modification events. Each modification event can be accomplished by introducing a nucleic acid molecule in to the reference cell. The introduction facilitates the expression or over-expression of a target enzyme. It is understood that the term “facilitates” encompasses the activation of endogenous polynucleotides encoding a target enzyme through genetic modification of e.g., a promoter sequence in a parental microorganism. It is further understood that the term “facilitates” encompasses the introduction of heterologous polynucleotides encoding a target enzyme in to a parental microorganism.

[0069] The term “engineer” refers to any manipulation of a microorganism that result in a detectable change in the microorganism, wherein the manipulation includes but is not limited to inserting a polynucleotide and/or polypeptide heterologous to the microorganism and mutating a polynucleotide and/or polypeptide native to the microorganism.

[0070] As used herein, the term “metabolically engineered” or “metabolic engineering” involves rational pathway design and assembly of biosynthetic genes, genes associated with operons, and control elements of such polynucleotides, for the production of a desired metabolite. “Metabolically engineered” can further include optimization of metabolic flux by regulation and optimization of transcription, translation, protein stability and protein functionality using genetic engineering and appropriate culture condition including the reduction of, disruption, or knocking out of, a competing metabolic pathway that competes with an intermediate leading to a desired pathway.

[0071] The terms “metabolically engineered microorganism” and “modified microorganism” are used interchangeably herein and refer not only to the particular subject cell but to the progeny or potential progeny of such a cell. Because certain modifications may occur in succeeding generations due to either mutation or environmental influences, such progeny may not, in fact, be identical to the parent cell, but are still included within the scope of the term as used herein.

[0072] The term “mutation” as used herein indicates any modification of a nucleic acid and/or polypeptide which results in an altered nucleic acid or polypeptide. Mutations include, for example, point mutations, deletions, or insertions of single or multiple residues in a polynucleotide, which includes alterations arising within a protein-encoding region of a gene as well as alterations in regions outside of a protein-encoding sequence, such as, but not limited to, regulatory or promoter sequences. A genetic alteration may be a mutation of any type. For instance, the mutation may constitute a point mutation, a frame-shift mutation, an insertion, or a deletion of part or all of a gene. In addition, in some embodiments of the modified microorganism, a portion of the microorganism genome has been replaced with a heterologous polynucleotide. In some embodiments, the mutations are naturally-occurring. In other embodiments, the mutations are the results of artificial mutation pressure. In still other embodiments, the mutations in the microorganism genome are the result of genetic engineering.

[0073] The term “biosynthetic pathway”, also referred to as “metabolic pathway”, refers to a set of anabolic or catabolic biochemical reactions for converting one chemical species into another. Gene products belong to the same “metabolic pathway” if they, in parallel or in series, act on the same substrate, produce the same product, or act on or produce a metabolic intermediate (i.e., metabolite) between the same substrate and metabolite end product.

[0074] The term “heterologous” as used herein with reference to molecules and in particular enzymes and polynucleotides, indicates molecules that are expressed in an organism other than the organism from which they originated or are found in nature, independently on the level of expression that can be lower, equal or higher than the level of expression of the molecule in the native microorganism.

[0075] On the other hand, the term “native” or “endogenous” as used herein with reference to molecules, and in particular enzymes and polynucleotides, indicates molecules that are expressed in the organism in which they originated or are found in nature, independently on the level of expression that can be lower equal or higher than the level of expression of the molecule in the native microorganism. It is understood that expression of native enzymes or polynucleotides may be modified in recombinant microorganisms.

[0076] The term “overexpressed” as used herein with reference to a gene indicates that the gene is expressed differently than in its native wild-type microorganism. Overexpressed genes include heterologous as well as native genes. Any engineering of a strain that leads to a change in the expression level of a native gene or that leads to a change in the regulation of said native gene renders said native gene “overexpressed.”

[0077] The term “mitochondrially targeted” as used herein refers to proteins that are completely or partially localized in the mitochondria of their host microorganism. This term can refer to proteins that are produced in their native form or it can refer to proteins that have been engineered to cause their mitochondrial localization.

[0078] The term “carbon source” generally refers to a substance suitable to be used as a source of carbon for eukaryotic cell growth. Carbon sources include, but are not limited to, biomass hydrolysates, starch, sucrose, cellulose, hemicellulose, xylose, and lignin, as well as monomeric components of these substrates. Carbon sources can comprise various organic compounds in various forms, including, but not limited to polymers, carbohydrates, acids, alcohols, aldehydes, ketones, amino acids, peptides, etc. These include, for example, various monosaccharides such as glucose, dextrose (D-glucose), maltose, oligosaccharides, polysaccharides, saturated or unsaturated fatty acids, succinate, lactate, acetate, ethanol, etc., or mixtures thereof. Photosynthetic organisms can additionally produce a carbon source as a product of photosynthesis. In some embodiments, carbon sources may be selected from biomass hydrolysates and glucose.

[0079] As used herein, the term “C2-compound” refers to organic compounds comprised of two carbon atoms, including but not limited to ethanol and acetate. As used herein, a “C2-independent organism” encompasses organisms that do not require ethanol or acetate for growth. Such a C2-independent organism may grow on glucose.

[0080] The term “feedstock” is defined as a raw material or mixture of raw materials supplied to a microorganism or fermentation process from which other products can be made. For example, a carbon source, such as biomass or the carbon compounds derived from biomass are a feedstock for a microorganism that produces a biofuel in a fermentation process. However, a feedstock may contain nutrients other than a carbon source.

[0081] The term “substrate” or “suitable substrate” refers to any substance or compound that is converted or meant to be converted into another compound by the action of an enzyme. The term includes not only a single compound, but also combinations of compounds, such as solutions, mixtures and other materials which contain at least one substrate, or derivatives thereof. Further, the term “substrate” encompasses not only compounds that provide a carbon source suitable for use as a starting material, such as any biomass derived sugar, but also intermediate and end product metabolites used in a pathway associated with a metabolically engineered microorganism as described herein.

[0082] The term “fermentation” or “fermentation process” is defined as a process in which a microorganism is cultivated in a culture medium containing raw materials, such as feedstock and nutrients, wherein the microorganism converts raw materials, such as a feedstock, into products.

[0083] The term “cell dry weight” or “CDW” refers to the weight of the microorganism after the water contained in the microorganism has been removed using methods known to one skilled in the art. CDW is reported in g/L.

[0084] The term “biofuel” refers to a fuel in which all carbon contained within the fuel is derived from biomass and is biochemically converted, at least in part, in to a fuel by a microorganism. A biofuel is further defined as a non-ethanol compound which contains less than 0.5 oxygen atoms per carbon atom. A biofuel is a fuel in its own right, but may be blended with petroleum-derived fuels to generate a fuel. A biofuel may be used as a replacement for petrochemically-derived gasoline, diesel fuel, or jet fuel.

[0085] The term “volumetric productivity” or “production rate” is defined as the amount of product formed per volume of medium per unit of time. Volumetric productivity is reported in gram per liter per hour (g/L/h).

[0086] The term “specific productivity” is defined as the rate of formation of the product. To describe productivity as an inherent parameter of the microorganism and not of the fermentation process, productivity is herein further defined as the specific productivity in gram product per gram of cell dry weight (CDW) per hour (g/g CDW/h). Using the relation of CDW to OD₆₀₀ for the given microorganism specific productivity can also be expressed as gram product per liter culture medium per optical density of the culture broth at 600 nm (OD) per hour (g/L/h/OD)

[0087] The term “yield” is defined as the amount of product obtained per unit weight of raw material and may be expressed as g product per g substrate (g/g). Yield may be expressed as a percentage of the theoretical yield. “Theoretical yield” is defined as the maximum amount of product that can be generated per a given amount of substrate as dictated by the stoichiometry of the metabolic pathway used to make the product. For example, the theoretical yield for one typical conversion of glucose to isobutanol is 0.41 g/g. As such, a yield of butanol from glucose of 0.39 g/g would be expressed as 95% of theoretical or 95% theoretical yield.

[0088] The term “titre” or “titer” is defined as the strength of a solution or the concentration of a substance in solution. For example, the titre of a biofuel in a fermentation broth is described as g of biofuel in solution per liter of fermentation broth (g/L).

[0089] The term “total titer” is defined as the sum of all biofuel produced in a process, including but not limited to the biofuel in solution, the biofuel in gas phase, and any biofuel removed from the process and recovered relative to the initial volume in the process or the operating volume in the process.

[0090] A “facultative anaerobic organism” or a “facultative anaerobic microorganism” is defined as an organism that can grow in either the presence or in the absence of oxygen.

[0091] A “strictly anaerobic organism” or a “strictly anaerobic microorganism” is defined as an organism that cannot grow in the presence of oxygen and which does not survive exposure to any concentration of oxygen.

[0092] An “anaerobic organism” or an “anaerobic microorganism” is defined as an organism that cannot grow in the presence of oxygen.

[0093] “Aerobic conditions” are defined as conditions under which the oxygen concentration in the fermentation medium is sufficiently high for an aerobic or facultative anaerobic microorganism to use as a terminal electron acceptor.

[0094] In contrast, “Anaerobic conditions” are defined as conditions under which the oxygen concentration in the fermentation medium is too low for the microorganism to use as a terminal electron acceptor. Anaerobic conditions may be achieved by sparging a fermentation medium with an inert gas such as nitrogen until oxygen is no longer available to the microorganism as a terminal electron acceptor. Alternatively, anaerobic conditions may be achieved by the microorganism consuming the available oxygen of the fermentation until oxygen is unavailable to the microorganism as a terminal electron acceptor.

[0095] “Dissolved oxygen,” abbreviated as “DO” is expressed throughout as the percentage of saturating concentration of oxygen in water.

[0096] “Aerobic metabolism” refers to a biochemical process in which oxygen is used as a terminal electron acceptor to make energy, typically in the form of ATP, from carbohydrates. Aerobic metabolism occurs e.g. via glycolysis and the TCA cycle, wherein a single glucose molecule is metabolized completely into carbon dioxide in the presence of oxygen.

[0097] In contrast, “anaerobic metabolism” refers to a biochemical process in which oxygen is not the final acceptor of electrons contained in NADH. Anaerobic metabolism can be divided into anaerobic respiration, in which compounds other than oxygen serve as the terminal electron acceptor, and substrate level phosphorylation, in which the electrons from NADH are utilized to generate a reduced product via a “fermentative pathway.”

[0098] In “fermentative pathways”, NAD(P)H donates its electrons to a molecule produced by the same metabolic pathway that produced the electrons carried in NAD(P)H. For example, in one of the fermentative pathways of certain yeast strains, NAD(P)H generated through glycolysis transfers its electrons to pyruvate, yielding lactate. Fermentative pathways are usually active under anaerobic conditions but may also occur under aerobic conditions, under conditions where NADH is not fully oxidized via the respiratory chain. For example, above certain glucose concentrations, Crabtree positive yeasts produce large amounts of ethanol under aerobic conditions.

[0099] The term “fermentation product” means any main product plus its coupled product. A “coupled product” is produced as part of the stoichiometric conversion of the carbon source to the main fermentation product. An example for a coupled product is the two molecules of CO₂ that are produced with every molecule of isobutanol during production of isobutanol from glucose according the biosynthetic pathway described herein.

[0100] The term “byproduct” means an undesired product related to the production of a biofuel. Byproducts are generally disposed as waste, adding cost to a biofuel production process.

[0101] The term “co-product” means a secondary or incidental product related to the production of biofuel. Co-products have potential commercial value that increases the overall value of biofuel production, and may be the deciding factor as to the viability of a particular biofuel production process.

[0102] The term “non-fermenting yeast” is a yeast species that fails to demonstrate an anaerobic metabolism in which the electrons from NADH are utilized to generate a reduced product via a fermentative pathway such as the production of ethanol and CO₂ from glucose. Non-fermentative yeast can be identified by the “Durham Tube Test” (J. A. Barnett, R. W. Payne, and D. Yarrow. 2000. Yeasts Characteristics and Identification. 3^{rd} edition. p. 28-29. Cambridge University Press, Cambridge, UK.) or by monitoring the production of fermentation productions such as ethanol and CO₂.

[0103] The term “polynucleotide” is used herein interchangeably with the term “nucleic acid” and refers to an organic polymer composed of two or more monomers including nucleotides, nucleosides or analogs thereof, including but not limited to single stranded or double stranded, sense or antisense deoxyribonucleic acid (DNA) of any length and, where appropriate, single stranded or double stranded, sense or antisense ribonucleic acid (RNA) of any length, including siRNA. The term “nucleotide” refers to any of several compounds that consist of a ribose or deoxyribose sugar joined to a purine or a pyrimidine base and to a phosphate group, and that are the basic structural units of nucleic acids. The term “nucleoside” refers to a compound (as guanosine or adenosine) that consists of a purine or pyrimidine base combined with deoxyribose or ribose and is found especially in nucleic acids. The term “nucleotide analog” or “nucleoside analog” refers, respectively, to a nucleotide or nucleoside in which one or more individual atoms have been replaced with a different atom or with a different functional group. Accordingly, the term polynucleotide includes nucleic acids of any length, DNA, RNA, analogs and fragments thereof. A polynucleotide of three or more nucleotides is also called nucleotidic oligomer or oligonucleotide.

[0104] It is understood that the polynucleotides described herein include “genes” and that the nucleic acid molecules described herein include “vectors” or “plasmids.” Accordingly, the term “gene”, also called a “structural gene” refers to a polynucleotide that codes for a particular sequence of amino acids, which comprise all or part of one or more proteins or enzymes, and may include regulatory (non-transcribed) DNA sequences, such as promoter sequences, which determine for example the conditions under which the gene is expressed. The transcribed region of the gene may include untranslated regions, including introns, 5′-untranslated region (UTR), and 3′-UTR, as well as the coding sequence.

[0105] The term “expression” with respect to a gene sequence refers to transcription of the gene and, as appropriate, translation of the resulting mRNA transcript to a protein. Thus, as will be clear from the context, expression of a protein results from transcription and translation of the open reading frame sequence.

[0106] The term “operon” refers two or more genes which are transcribed as a single transcriptional unit from a common promoter. In some embodiments, the genes comprising the operon are contiguous genes. It is understood that transcription of an entire operon can be modified (i.e., increased, decreased, or eliminated) by modifying the common promoter. Alternatively, any gene or combination of genes in an operon can be modified to alter the function or activity of the encoded polypeptide. The modification can result in an increase in the activity of the encoded polypeptide. Further, the modification can impart new activities on the encoded polypeptide. Exemplary new activities include the use of alternative substrates and/or the ability to function in alternative environmental conditions.

[0107] In various embodiments described herein, NAD(P)H refers to either NADH or NADPH. NAD(P)⁺ refers to either NAD⁺ or NADP⁺.

[0108] A “vector” is any means by which a nucleic acid can be propagated and/or transferred between organisms, cells, or cellular components. Vectors include viruses, bacteriophage, pro-viruses, plasmids, phagemids, transposons, and artificial chromosomes such as YACs (yeast artificial chromosomes), BACs (bacterial artificial chromosomes), and PLACs (plant artificial chromosomes), and the like, that are “episomes,” that is, that replicate autonomously or can integrate into a chromosome of a host cell. A vector can also be a naked RNA polynucleotide, a naked DNA polynucleotide, a polynucleotide composed of both DNA and RNA within the same strand, a poly-lysine-conjugated DNA or RNA, a peptide-conjugated DNA or RNA, a liposome-conjugated DNA, or the like, that are not episomal in nature, or it can be an organism which comprises one or more of the above polynucleotide constructs such as an agrobacterium or a bacterium.

[0109] “Transformation” refers to the process by which a vector is introduced into a host cell. Transformation (or transduction, or transfection), can be achieved by any one of a number of means including electroporation, microinjection, biolistics (or particle bombardment-mediated delivery), or agrobacterium mediated transformation.

[0110] The term “enzyme” as used herein refers to any substance that catalyzes or promotes one or more chemical or biochemical reactions, which usually includes enzymes totally or partially composed of a polypeptide, but can include enzymes composed of a different molecule including polynucleotides.

[0111] The term “protein” or “polypeptide” as used herein indicates an organic polymer composed of two or more amino acidic monomers and/or analogs thereof. As used herein, the term “amino acid” or “amino acidic monomer” refers to any natural and/or synthetic amino acids including glycine and both D or L optical isomers. The term “amino acid analog” refers to an amino acid in which one or more individual atoms have been replaced, either with a different atom, or with a different functional group. Accordingly, the term polypeptide includes amino acidic polymer of any length including full length proteins, and peptides as well as analogs and fragments thereof. A polypeptide of three or more amino acids is also called a protein oligomer or oligopeptide

[0112] The term “homologs” used with respect to an original enzyme or gene of a first family or species refers to distinct enzymes or genes of a second family or species which are determined by functional, structural or genomic analyses to be an enzyme or gene of the second family or species which corresponds to the original enzyme or gene of the first family or species. Most often, homologs will have functional, structural or genomic similarities. Techniques are known by which homologs of an enzyme or gene can readily be cloned using genetic probes and PCR. Identity of cloned sequences as homolog can be confirmed using functional assays and/or by genomic mapping of the genes.

[0113] A protein has “homology” or is “homologous” to a second protein if the nucleic acid sequence that encodes the protein has a similar sequence to the nucleic acid sequence that encodes the second protein. Alternatively, a protein has homology to a second protein if the two proteins have “similar” amino acid sequences. (Thus, the term “homologous proteins” is defined to mean that the two proteins have similar amino acid sequences).

[0114] The term “analog” or “analogous” refers to nucleic acid or protein sequences or protein structures that are related to one another in function only and are not from common descent or do not share a common ancestral sequence. Analogs may differ in sequence but may share a similar structure, due to convergent evolution. For example, two enzymes are analogs or analogous if the enzymes catalyze the same reaction of conversion of a substrate to a product, are unrelated in sequence, and irrespective of whether the two enzymes are related in structure.

### The Microorganism in General

[0115] Microorganism Characterized by Producing Isobutanol from Pyruvate Via an Overexpressed Isobutanol Pathway

[0116] Native producers of 1-butanol, such as Clostridium acetobutylicum, are known, but these organisms also generate byproducts such as acetone, ethanol, and butyrate during fermentations. Furthermore, these microorganisms are relatively difficult to manipulate, with significantly fewer tools available than in more commonly used production hosts such as E. coli. Additionally, the physiology and metabolic regulation of these native producers are much less well understood, impeding rapid progress towards high-efficiency production. Furthermore, no native microorganisms have been identified that can metabolize glucose into isobutanol in industrially relevant quantities.

[0117] The production of isobutanol and other fusel alcohols by various yeast species, including Saccharomyces cerevisiae is of special interest to the distillers of alcoholic beverages, for whom fusel alcohols constitute often undesirable off-notes. Production of isobutanol in wild-type yeasts has been documented on various growth media, ranging from grape must from winemaking (Romano, et al., Metabolic diversity of Saccharomyces cerevisiae strains from spontaneously fermented grape musts, 19:311-315, 2003), in which 12-219 mg/L isobutanol were produced, to supplemented minimal media (Oliviera, et al. (2005) World Journal of Microbiology and Biotechnology 21:1569-1576), producing 16-34 mg/L isobutanol. Work from Dickinson, et al. (J Biol. Chem. 272(43):26871-8, 1997) has identified the enzymatic steps utilized in an endogenous S. cerevisiae pathway converting branch-chain amino acids (e.g., valine or leucine) to isobutanol.

[0118] Recombinant microorganisms provided herein can express a plurality of heterologous and/or native target enzymes involved in pathways for the production isobutanol from a suitable carbon source.

[0119] Accordingly, metabolically “engineered” or “modified” microorganisms are produced via the introduction of genetic material into a host or parental microorganism of choice and/or by modification of the expression of native genes, thereby modifying or altering the cellular physiology and biochemistry of the microorganism. Through the introduction of genetic material and/or the modification of the expression of native genes the parental microorganism acquires new properties, e.g. the ability to produce a new, or greater quantities of, an intracellular metabolite. As described herein, the introduction of genetic material and/or the modification of the expression of native genes into a parental microorganism results in a new or modified ability to produce isobutanol. The genetic material introduced into and/or the genes modified for expression in the parental microorganism contains gene(s), or parts of genes, coding for one or more of the enzymes involved in a biosynthetic pathway for the production of isobutanol and may also include additional elements for the expression and/or regulation of expression of these genes, e.g. promoter sequences.

[0120] An engineered or modified microorganism can also include in the alternative or in addition to the introduction of a genetic material into a host or parental microorganism, the disruption, deletion or knocking out of a gene or polynucleotide to alter the cellular physiology and biochemistry of the microorganism. Through the reduction, disruption or knocking out of a gene or polynucleotide the microorganism acquires new or improved properties (e.g., the ability to produce a new metabolite or greater quantities of an intracellular metabolite, improve the flux of a metabolite down a desired pathway, and/or reduce the production of undesirable by-products).

[0121] Recombinant microorganisms provided herein may also produce metabolites in quantities not available in the parental microorganism. A “metabolite” refers to any substance produced by metabolism or a substance necessary for or taking part in a particular metabolic process. A metabolite can be an organic compound that is a starting material (e.g., glucose or pyruvate), an intermediate (e.g., 2-ketoisovalerate), or an end product (e.g., isobutanol) of metabolism. Metabolites can be used to construct more complex molecules, or they can be broken down into simpler ones. Intermediate metabolites may be synthesized from other metabolites, perhaps used to make more complex substances, or broken down into simpler compounds, often with the release of chemical energy.

[0122] Exemplary metabolites include glucose, pyruvate, and isobutanol. The metabolite isobutanol can be produced by a recombinant microorganism metabolically engineered to express or over-express a metabolic pathway that converts pyruvate to isobutanol. An exemplary metabolic pathway that converts pyruvate to isobutanol may be comprised of a acetohydroxy acid synthase (ALS) enzyme encoded by, for example, BsalsS from B. subtilis, a ketolacid reductoisomerase (KARI) encoded by, for example ilvC from E. coli, a dihydroxy-acid dehydratase (DHAD), encoded by, for example ilvD from E. coli, a 2-keto-acid decarboxylase (KIVD) encoded by, for example LlkivD (SEQ ID NO: 153) or LlkivD2 (SEQ ID NO: 155) from L. lactis, and an isobutyraldehyde dehydrogenase (IDH), encoded by, for example, a native S. cerevisiae alcohol dehydrogenase gene like ADH7.

[0123] Accordingly, provided herein are recombinant microorganisms that produce isobutanol and in some aspects may include the elevated expression of target enzymes such as ALS (encoded e.g. by ILV2 and ILV6 from Saccharomyces cerevisiae or BsalsS from Bacillus subtilis), KARI (encoded e.g. by ILV5 from S. cerevisiae or ilvC from E. coli), DHAD (encoded, e.g. by ILV3 from S. cerevisiae or by ilvD from E. coli), and KIVD (encoded, e.g. by PDC1, PDC5 and PDC6 from S. cerevisiae, ARO10 from S. cerevisiae, THI3 from S. cerevisiae, LlkivD from L. lactis, or pdc from Z. mobilis).

[0124] The disclosure identifies specific genes useful in the methods, compositions and organisms of the disclosure; however it will be recognized that absolute identity to such genes is not necessary. For example, changes in a particular gene or polynucleotide comprising a sequence encoding a polypeptide or enzyme can be performed and screened for activity. Typically such changes comprise conservative mutation and silent mutations. Such modified or mutated polynucleotides and polypeptides can be screened for expression of a functional enzyme using methods known in the art.

[0125] Due to the inherent degeneracy of the genetic code, other polynucleotides which encode substantially the same or a functionally equivalent polypeptide can also be used to clone and express the polynucleotides encoding such enzymes.

[0126] As will be understood by those of skill in the art, it can be advantageous to modify a coding sequence to enhance its expression in a particular host. The genetic code is redundant with 64 possible codons, but most organisms typically use a subset of these codons. The codons that are utilized most often in a species are called optimal codons, and those not utilized very often are classified as rare or low-usage codons. Codons can be substituted to reflect the preferred codon usage of the host, a process sometimes called “codon optimization” or “controlling for species codon bias.”

[0127] Optimized coding sequences containing codons preferred by a particular prokaryotic or eukaryotic host (see also, Murray et al. (1989) Nucl. Acids Res. 17:477-508) can be prepared, for example, to increase the rate of translation or to produce recombinant RNA transcripts having desirable properties, such as a longer half-life, as compared with transcripts produced from a non-optimized sequence. Translation stop codons can also be modified to reflect host preference. For example, typical stop codons for S. cerevisiae and mammals are UAA and UGA, respectively. The typical stop codon for monocotyledonous plants is UGA, whereas insects and E. coli commonly use UAA as the stop codon (Dalphin et al. (1996) Nucl. Acids Res. 24: 216-218). Methodology for optimizing a nucleotide sequence for expression in a plant is provided, for example, in U.S. Pat. No. 6,015,891, and the references cited therein.

[0128] Those of skill in the art will recognize that, due to the degenerate nature of the genetic code, a variety of DNA compounds differing in their nucleotide sequences can be used to encode a given enzyme of the disclosure. The native DNA sequence encoding the biosynthetic enzymes described above are referenced herein merely to illustrate an embodiment of the disclosure, and the disclosure includes DNA compounds of any sequence that encode the amino acid sequences of the polypeptides and proteins of the enzymes utilized in the methods of the disclosure. In similar fashion, a polypeptide can typically tolerate one or more amino acid substitutions, deletions, and insertions in its amino acid sequence without loss or significant loss of a desired activity. The disclosure includes such polypeptides with different amino acid sequences than the specific proteins described herein so long as they modified or variant polypeptides have the enzymatic anabolic or catabolic activity of the reference polypeptide. Furthermore, the amino acid sequences encoded by the DNA sequences shown herein merely illustrate embodiments of the disclosure.

[0129] In addition, homologs of enzymes useful for generating metabolites are encompassed by the microorganisms and methods provided herein.

[0130] As used herein, two proteins (or a region of the proteins) are substantially homologous when the amino acid sequences have at least about 30%, 40%, 50% 60%, 65%, 70%, 75%, 80%, 85%, 90%, 91%, 92%, 93%, 94%, 95%, 96%, 97%, 98%, or 99% identity. To determine the percent identity of two amino acid sequences, or of two nucleic acid sequences, the sequences are aligned for optimal comparison purposes (e.g., gaps can be introduced in one or both of a first and a second amino acid or nucleic acid sequence for optimal alignment and non-homologous sequences can be disregarded for comparison purposes). In one embodiment, the length of a reference sequence aligned for comparison purposes is at least 30%, typically at least 40%, more typically at least 50%, even more typically at least 60%, and even more typically at least 70%, 80%, 90%, 100% of the length of the reference sequence. The amino acid residues or nucleotides at corresponding amino acid positions or nucleotide positions are then compared. When a position in the first sequence is occupied by the same amino acid residue or nucleotide as the corresponding position in the second sequence, then the molecules are identical at that position (as used herein amino acid or nucleic acid “identity” is equivalent to amino acid or nucleic acid “homology”). The percent identity between the two sequences is a function of the number of identical positions shared by the sequences, taking into account the number of gaps, and the length of each gap, which need to be introduced for optimal alignment of the two sequences.

[0131] When “homologous” is used in reference to proteins or peptides, it is recognized that residue positions that are not identical often differ by conservative amino acid substitutions. A “conservative amino acid substitution” is one in which an amino acid residue is substituted by another amino acid residue having a side chain (R group) with similar chemical properties (e.g., charge or hydrophobicity). In general, a conservative amino acid substitution will not substantially change the functional properties of a protein. In cases where two or more amino acid sequences differ from each other by conservative substitutions, the percent sequence identity or degree of homology may be adjusted upwards to correct for the conservative nature of the substitution. Means for making this adjustment are well known to those of skill in the art (see, e.g., Pearson et al., 1994, hereby incorporated herein by reference).

[0132] The following six groups each contain amino acids that are conservative substitutions for one another: 1) Serine (S), Threonine (T); 2) Aspartic Acid (D), Glutamic Acid (E); 3) Asparagine (N), Glutamine (Q); 4) Arginine (R), Lysine (K); 5) Isoleucine (I), Leucine (L), Methionine (M), Alanine (A), Valine (V), and 6) Phenylalanine (F), Tyrosine (Y), Tryptophan (W).

[0133] Sequence homology for polypeptides, which is also referred to as percent sequence identity, is typically measured using sequence analysis software. See, e.g., the Sequence Analysis Software Package of the Genetics Computer Group (GCG), University of Wisconsin Biotechnology Center, 910 University Avenue, Madison, Wis. 53705. Protein analysis software matches similar sequences using measure of homology assigned to various substitutions, deletions and other modifications, including conservative amino acid substitutions. For instance, GCG contains programs such as “Gap” and “Bestfit” which can be used with default parameters to determine sequence homology or sequence identity between closely related polypeptides, such as homologous polypeptides from different species of organisms or between a wild-type protein and a mutant protein. See, e.g., GCG Version 6.1.

[0134] A typical algorithm used comparing a molecule sequence to a database containing a large number of sequences from different organisms is the computer program BLAST (Altschul, S. F., et al. (1990) “Basic local alignment search tool.” J. Mol. Biol. 215:403-410; Gish, W. and States, D. J. (1993) “Identification of protein coding regions by database similarity search.” Nature Genet. 3:266-272; Madden, T. L., et al. (1996) “Applications of network BLAST server” Meth. Enzymol. 266:131-141; Altschul, S. F., et al. (1997) “Gapped BLAST and PSI-BLAST: a new generation of protein database search programs.” Nucleic Acids Res. 25:3389-3402; Zhang, J. and Madden, T. L. (1997) “PowerBLAST: A new network BLAST application for interactive or automated sequence analysis and annotation.” Genome Res. 7:649-656), especially blastp or tblastn (Altschul, S. F., et al. (1997) “Gapped BLAST and PSI-BLAST: a new generation of protein database search programs.” Nucleic Acids Res. 25:3389-3402). Typical parameters for BLASTp are: Expectation value: 10 (default); Filter: seg (default); Cost to open a gap: 11 (default); Cost to extend a gap: 1 (default); Max. alignments: 100 (default); Word size: 11 (default); No. of descriptions: 100 (default); Penalty Matrix: BLOSUM62.

[0135] When searching a database containing sequences from a large number of different organisms, it is typical to compare amino acid sequences. Database searching using amino acid sequences can be measured by algorithms other than blastp known in the art. For instance, polypeptide sequences can be compared using FASTA, a program in GCG Version 6.1. FASTA provides alignments and percent sequence identity of the regions of the best overlap between the query and search sequences (Pearson, W. R. (1990) “Rapid and Sensitive Sequence Comparison with FASTP and FASTA” Meth. Enzymol. 183:63-98). For example, percent sequence identity between amino acid sequences can be determined using FASTA with its default parameters (a word size of 2 and the PAM250 scoring matrix), as provided in GCG Version 6.1, hereby incorporated herein by reference.

[0136] The disclosure provides metabolically engineered microorganisms comprising a biochemical pathway for the production of isobutanol from a suitable substrate at a high yield. A metabolically engineered microorganism of the disclosure comprises one or more recombinant polynucleotides within the genome of the organism or external to the genome within the organism. The microorganism can comprise a reduction, disruption or knockout of a gene found in the wild-type organism and/or introduction of a heterologous polynucleotide and/or expression or overexpression of an endogenous polynucleotide.

[0137] In one aspect, the disclosure provides a recombinant microorganism comprising elevated or altered expression of at least one target enzyme as compared to a parental microorganism or encodes an enzyme not found in the parental organism. In another or further aspect, the microorganism comprises a reduction, disruption or knockout of at least one gene encoding an enzyme that competes with a metabolite necessary for the production of isobutanol. The recombinant microorganism produces at least one metabolite involved in a biosynthetic pathway for the production of isobutanol. In general, the recombinant microorganisms comprises at least one recombinant metabolic pathway that comprises a target enzyme and may further include a reduction in activity or expression of an enzyme in a competitive biosynthetic pathway. The pathway acts to modify a substrate or metabolic intermediate in the production of isobutanol. The target enzyme is encoded by, and expressed from, a polynucleotide derived from a suitable biological source. In some embodiments, the polynucleotide comprises a gene derived from a prokaryotic or eukaryotic source and recombinantly engineered into the microorganism of the disclosure. In other embodiments, the polynucleotide comprises a gene that is native to the host organism.

[0138] It is understood that a range of microorganisms can be modified to include a recombinant metabolic pathway suitable for the production of isobutanol. In various embodiments, microorganisms may be selected from yeast microorganisms. Yeast microorganisms for the production of isobutanol at high yield may be selected based on certain characteristics:

[0139] Another characteristic may include the property that the microorganism is selected to convert various carbon sources into isobutanol. Accordingly, in one embodiment, the recombinant microorganism herein disclosed can convert a variety of carbon sources to products, including but not limited to glucose, galactose, mannose, xylose, arabinose, lactose, sucrose, and mixtures thereof.

[0140] The recombinant microorganism may thus further include a pathway for the fermentation of isobutanol from five-carbon (pentose) sugars including xylose. Most yeast species metabolize xylose via a complex route, in which xylose is first reduced to xylitol via a xylose reductase (XR) enzyme. The xylitol is then oxidized to xylulose via a xylitol dehydrogenase (XDH) enzyme. The xylulose is then phosphorylated via a xylulokinase (XK) enzyme. This pathway operates inefficiently in yeast species because it introduces a redox imbalance in the cell. The xylose-to-xylitol step uses NADH as a cofactor, whereas the xylitol-to-xylulose step uses NADPH as a cofactor. Other processes must operate to restore the redox imbalance within the cell. This often means that the organism cannot grow anaerobically on xylose or other pentose sugar. Accordingly, a yeast species that can efficiently ferment xylose and other pentose sugars into a desired fermentation product is therefore very desirable.

[0141] Thus, in one aspect, the recombinant is engineered to express a functional exogenous xylose isomerase. Exogenous xylose isomerases functional in yeast are known in the art. See, e.g., Rajgarhia et al, US20060234364, which is herein incorporated by reference in its entirety. In an embodiment according to this aspect, the exogenous xylose isomerase gene is operatively linked to promoter and terminator sequences that are functional in the yeast cell. In a preferred embodiment, the recombinant microorganism further has a deletion or disruption of a native gene that encodes for an enzyme (e.g. XR and/or XDH) that catalyzes the conversion of xylose to xylitol. In a further preferred embodiment, the recombinant microorganism also contains a functional, exogenous xylulokinase (XK) gene operatively linked to promoter and terminator sequences that are functional in the yeast cell. In one embodiment, the xylulokinase (XK) gene is overexpressed.

[0142] Another characteristic may include the property that the wild-type or parental microorganism is non-fermenting. In other words, it cannot metabolize a carbon source anaerobically while the yeast is able to metabolize a carbon source in the presence of oxygen. Non-fermenting yeast refers to both naturally occurring yeasts as well as genetically modified yeast. During anaerobic fermentation with fermentative yeast, the main pathway to oxidize the NADH from glycolysis is through the production of ethanol. Ethanol is produced by alcohol dehydrogenase (ADH) via the reduction of acetaldehyde, which is generated from pyruvate by pyruvate decarboxylase (PDC). Thus, in one embodiment, a fermentative yeast can be engineered to be non-fermentative by the reduction or elimination of the native PDC activity. Thus, most of the pyruvate produced by glycolysis is not consumed by PDC and is available for the isobutanol pathway. Deletion of this pathway increases the pyruvate and the reducing equivalents available for the isobutanol pathway. Fermentative pathways contribute to low yield and low productivity of isobutanol. Accordingly, deletion of PDC may increase yield and productivity of isobutanol. In one embodiment, the yeast microorganisms may be selected from the “Saccharomyces Yeast Clade”, defined as an ascomycetous yeast taxonomic class by Kurtzman and Robnett in 1998 (“Identification and phylogeny of ascomycetous yeast from analysis of nuclear large subunit (26S) ribosomal DNA partial sequences.” Antonie van Leeuwenhoek 73: 331-371). They were able to determine the relatedness of yeast of approximately 500 yeast species by comparing the nucleotide sequence of the D1/D2 domain at the 5′ end of the gene encoding the large ribosomal subunit 26S. In pair-wise comparisons of the D1/D2 nucleotide sequence of S. cerevisiae and the two most distant yeast in the Saccharomyces clade: K. lactis and K. marxianus, yeast from this clade share greater than 80% identity.

[0143] The term “Saccharomyces sensu stricto” taxonomy group is a cluster of yeast species that are highly related to S. cerevisiae (Rainieri, S. et al 2003. Saccharomyces Sensu Stricto: Systematics, Genetic Diversity and Evolution. J. Biosci Bioengin 96(1)1-9. Saccharomyces sensu stricto yeast species include but are not limited to S. cerevisiae, S. cerevisiae, S. kudriavzevii, S. mikatae, S. bayanus, S. uvarum, S. carocanis and hybrids derived from these species (Masneuf et al. 1998. New Hybrids between Saccharomyces Sensu Stricto Yeast Species Found Among Wine and Cider Production Strains. Yeast 7(1)61-72).

[0144] An ancient whole genome duplication (WGD) event occurred during the evolution of hemiascomycete yeast was discovered using comparative genomics tools (Kellis et al 2004 “Proof and evolutionary analysis of ancient genome duplication in the yeast S. cerevisiae.” Nature 428:617-624. Dujon et al 2004 “Genome evolution in yeasts.” Nature 430:35-44. Langkjaer et al 2003 “Yeast genome duplication was followed by asynchronous differentiation of duplicated genes.” Nature 428:848-852. Wolfe and Shields 1997 “Molecular evidence for an ancient duplication of the entire yeast genome.” Nature 387:708-713.) Using this major evolutionary event, yeast can be divided into species that diverged from a common ancestor following the WGD event (termed “post-WGD yeast” herein) and species that diverged from the yeast lineage prior to the WGD event (termed “pre-WGD yeast” herein).

[0145] Accordingly, in one embodiment, the yeast microorganism may be selected from a post-WGD yeast genus, including but not limited to Saccharomyces and Candida. The favored post-WGD yeast species include: S. cerevisiae, S. uvarum, S. bayanus, S. paradoxus, S. castelli, and C. glabrata.

[0146] In another embodiment, the yeast microorganism may be selected from a pre-whole genome duplication (pre-WBD) yeast genus including but not limited to Saccharomyces, Kluyveromyces, Candida, Pichia, Debaryomyces, Hansenula, Pachysolen, Yarrowia and, Schizosaccharomyces. Representative pre-WGD yeast species include: S. kluyveri, K. thermotolerans, K. marxianus, K. waltii, K. lactis, C. tropicalis, P. pastoris, P. anomala, P. stipitis, P. kudriavzevii, D. hansenii, H. anomala, P. tannophilis, Y. lipolytica, and S. pombe.

[0147] A yeast microorganism may be either Crabtree-negative or Crabtree-positive. A yeast cell having a Crabtree-negative phenotype is any yeast cell that does not exhibit the Crabtree effect. The term “Crabtree-negative” refers to both naturally occurring and genetically modified organisms. Briefly, the Crabtree effect is defined as the inhibition of oxygen consumption by a microorganism when cultured under aerobic conditions due to the presence of a high concentration of glucose (e.g., 50 g-glucose L⁻¹). In other words, a yeast cell having a Crabtree-positive phenotype continues to ferment irrespective of oxygen availability due to the presence of glucose, while a yeast cell having a Crabtree-negative phenotype does not exhibit glucose mediated inhibition of oxygen consumption.

[0148] Accordingly, in one embodiment the yeast microorganism may be selected from yeast with a Crabtree-negative phenotype including but not limited to the following genera: Kluyveromyces, Pichia, Hansenula, and Candida. Crabtree-negative species include but are not limited to: K. lactis, K. marxianus, P. anomala, P. stipitis, P. kudriavzevii, H. anomala, and C. utilis.

[0149] In another embodiment, the yeast microorganism may be selected from a yeast with a Crabtree-positive phenotype, including but not limited to Saccharomyces, Kluyveromyces, Zygosaccharomyces, Debaryomyces, Pichia and Schizosaccharomyces. Crabtree-positive yeast species include but are not limited to: S. cerevisiae, S. uvarum, S. bayanus, S. paradoxus, S. castelli, S. kluyveri, K. thermotolerans, C. glabrata, Z. bailli, Z. rouxii, D. hansenii, P. pastorius, and S. pombe.

[0150] In one embodiment, a yeast microorganism is engineered to convert a carbon source, such as glucose, to pyruvate by glycolysis and the pyruvate is converted to isobutanol via an engineered isobutanol pathway (See, e.g., PCT/US2006/041602 and PCT/US2008/053514). Alternative pathways for the production of isobutanol have been described in International Patent Application No PCT/US2006/041602 and in Dickinson et al., Journal of Biological Chemistry 273: 25751-15756 (1998).

[0151] Accordingly, the engineered isobutanol pathway to convert pyruvate to isobutanol can be, but is not limited to, the following reactions:

[0152] 1. 2 pyruvate→acetolactate+CO₂

[0153] 2. acetolactate+NAD(P)H→2,3-dihydroxyisovalerate+NAD(P)⁺

[0154] 3. 2,3-dihydroxyisovalerate→alpha-ketoisovalerate

[0155] 4. alpha-ketoisovalerate→isobutyraldehyde+CO₂

[0156] 5. isobutyraldehyde+NAD(P)H→isobutanol+NAD(P)⁺

[0157] These reactions are carried out by the enzymes 1) Acetolactate Synthase (ALS), 2) Ketol-acid Reducto-Isomerase (KARI), 3) Dihydroxy-acid dehydratase (DHAD), 4) Keto-isovalerate decarboxylase (KIVD), and 5) an Isobutyraldehyde Dehydrogenase (IDH) (FIG. 1).

[0158] In another embodiment, the yeast microorganism is engineered to overexpress these enzymes. For example, ALS can be encoded by the alsS gene of B. subtilis, alsS of L. lactis, or the ilvK gene of K. pneumonia. For example, KARI can be encoded by the ilvC genes of E. coli, C. glutamicum, M. maripaludis, or Piromyces sp E2. For example, DHAD can be encoded by the ilvD genes of E. coli or C. glutamicum. KIVD can be encoded by the LlkivD gene of L. lactis. IDH can be encoded by ADH2, ADH6, or ADH7 of S. cerevisiae. Isobutyraldehyde dehydrogenase or IDH is defined as an alcohol dehydrogenase (ADH) that catalyzes the conversion of isobutyraldehyde to isobutanol.

[0159] The yeast microorganism of the invention may be engineered to have increased ability to convert pyruvate to isobutanol. In one embodiment, the yeast microorganism may be engineered to have increased ability to convert pyruvate to isobutyraldehyde. In another embodiment, the yeast microorganism may be engineered to have increased ability to convert pyruvate to keto-isovalerate. In another embodiment, the yeast microorganism may be engineered to have increased ability to convert pyruvate to 2,3-dihydroxyisovalerate. In another embodiment, the yeast microorganism may be engineered to have increased ability to convert pyruvate to acetolactate.

[0160] Furthermore, any of the genes encoding the foregoing enzymes (or any others mentioned herein (or any of the regulatory elements that control or modulate expression thereof)) may be optimized by genetic/protein engineering techniques, such as directed evolution or rational mutagenesis, which are known to those of ordinary skill in the art. Such action allows those of ordinary skill in the art to optimize the enzymes for expression and activity in yeast.

[0161] It is understood that various microorganisms can act as “sources” for genetic material encoding target enzymes suitable for use in a recombinant microorganism provided herein. For example, In addition, genes encoding these enzymes can be identified from other fungal and bacterial species and can be expressed for the modulation of this pathway. A variety of organisms could serve as sources for these enzymes, including, but not limited to, Saccharomyces spp., including S. cerevisiae and S. uvarum, Kluyveromyces spp., including K. thermotolerans, K. lactis, and K. marxianus, Pichia spp., Hansenula spp., including H. polymorpha, Candida spp., Trichosporon spp., Yamadazyma spp., including Y. stipitis, Schizosaccharomyces spp., including S. pombe, Cryptococcus spp., Aspergillus spp., or Neurospora spp. Sources of genes from anaerobic fungi include, but not limited to, Piromyces spp., Orpinomyces spp., or Neocallimastix spp. Sources of prokaryotic enzymes that are useful include, but not limited to, Escherichia. coli, Zymomonas mobilis, Staphylococcus aureus, Bacillus spp., Clostridium spp., Corynebacterium spp., Pseudomonas spp., Lactococcus spp., Enterobacter spp., and Salmonella spp.

### Methods in General

### Gene Expression

[0162] In another embodiment a method of producing a recombinant microorganism that converts a suitable carbon substrate to isobutanol is provided. The method includes transforming a microorganism with one or more recombinant polynucleotides encoding polypeptides that include but are not limited to, for example, ALS, KARI, DHAD, KIVD, IDH. Polynucleotides that encode enzymes useful for generating metabolites including homologs, variants, fragments, related fusion proteins, or functional equivalents thereof, are used in recombinant nucleic acid molecules that direct the expression of such polypeptides in appropriate host cells, such as bacterial or yeast cells. It is understood that the addition of sequences which do not alter the encoded activity of a polynucleotide, such as the addition of a non-functional or non-coding sequence, is a conservative variation of the basic nucleic acid. The “activity” of an enzyme is a measure of its ability to catalyze a reaction resulting in a metabolite, i.e., to “function”, and may be expressed as the rate at which the metabolite of the reaction is produced. For example, enzyme activity can be represented as the amount of metabolite produced per unit of time or per unit of enzyme (e.g., concentration or weight), or in terms of affinity or dissociation constants.

[0163] Those of skill in the art will recognize that, due to the degenerate nature of the genetic code, a variety of DNA compounds differing in their nucleotide sequences can be used to encode a given amino acid sequence of the disclosure. The native DNA sequence encoding the biosynthetic enzymes described herein are referenced herein merely to illustrate an embodiment of the disclosure, and the disclosure includes DNA compounds of any sequence that encode the amino acid sequences of the polypeptides and proteins of the enzymes utilized in the methods of the disclosure. In similar fashion, a polypeptide can typically tolerate one or more amino acid substitutions, deletions, and insertions in its amino acid sequence without loss or significant loss of a desired activity. The disclosure includes such polypeptides with alternate amino acid sequences, and the amino acid sequences encoded by the DNA sequences shown herein merely illustrate embodiments of the disclosure.

[0164] The disclosure provides nucleic acid molecules in the form of recombinant DNA expression vectors or plasmids, as described in more detail below, that encode one or more target enzymes. Generally, such vectors can either replicate in the cytosol of the host microorganism or integrate into the chromosomal DNA of the host microorganism. In either case, the vector can be a stable vector (i.e., the vector remains present over many cell divisions, even if only with selective pressure) or a transient vector (i.e., the vector is gradually lost by host microorganisms with increasing numbers of cell divisions). The disclosure provides DNA molecules in isolated (i.e., not pure, but existing in a preparation in an abundance and/or concentration not found in nature) and purified (i.e., substantially free of contaminating materials or substantially free of materials with which the corresponding DNA would be found in nature) forms.

[0165] Provided herein are methods for the expression of one or more of the biosynthetic genes involved in isobutanol biosynthesis and recombinant DNA expression vectors useful in the method. Thus, included within the scope of the disclosure are recombinant expression vectors that include such nucleic acids. The term expression vector refers to a nucleic acid that can be introduced into a host microorganism or cell-free transcription and translation system. An expression vector can be maintained permanently or transiently in a microorganism, whether as part of the chromosomal or other DNA in the microorganism or in any cellular compartment, such as a replicating vector in the cytosol. An expression vector also comprises a promoter that drives expression of an RNA, which typically is translated into a polypeptide in the microorganism or cell extract. For efficient translation of RNA into protein, the expression vector also typically contains a ribosome-binding site sequence positioned upstream of the start codon of the coding sequence of the gene to be expressed. Other elements, such as enhancers, secretion signal sequences, transcription termination sequences, and one or more marker genes by which host microorganisms containing the vector can be identified and/or selected, may also be present in an expression vector. Selectable markers, i.e., genes that confer antibiotic resistance or sensitivity, are used and confer a selectable phenotype on transformed cells when the cells are grown in an appropriate selective medium.

[0166] The various components of an expression vector can vary widely, depending on the intended use of the vector and the host cell(s) in which the vector is intended to replicate or drive expression. Expression vector components suitable for the expression of genes and maintenance of vectors in E. coli, yeast, Streptomyces, and other commonly used cells are widely known and commercially available. For example, suitable promoters for inclusion in the expression vectors of the disclosure include those that function in eukaryotic or prokaryotic host microorganisms. Promoters can comprise regulatory sequences that allow for regulation of expression relative to the growth of the host microorganism or that cause the expression of a gene to be turned on or off in response to a chemical or physical stimulus. For E. coli and certain other bacterial host cells, promoters derived from genes for biosynthetic enzymes, antibiotic-resistance conferring enzymes, and phage proteins can be used and include, for example, the galactose, lactose (lac), maltose, tryptophan (tip), beta-lactamase (bla), bacteriophage lambda PL, and T5 promoters. In addition, synthetic promoters, such as the tac promoter (U.S. Pat. No. 4,551,433), can also be used. For E. coli expression vectors, it is useful to include an E. coli origin of replication, such as from pUC, p1P, p1, and pBR.

[0167] Thus, recombinant expression vectors contain at least one expression system, which, in turn, is composed of at least a portion of a biosynthetic gene coding sequences operably linked to a promoter and optionally termination sequences that operate to effect expression of the coding sequence in compatible host cells. The host cells are modified by transformation with the recombinant DNA expression vectors of the disclosure to contain the expression system sequences either as extrachromosomal elements or integrated into the chromosome.

[0168] Moreover, methods for expressing a polypeptide from a nucleic acid molecule that are specific to yeast microorganisms are well known. For example, nucleic acid constructs that are used for the expression of heterologous polypeptides within Kluyveromyces and Saccharomyces are well known (see, e.g., U.S. Pat. Nos. 4,859,596 and 4,943,529, each of which is incorporated by reference herein in its entirety for Kluyveromyces and, e.g., Gellissen et al., Gene 190(1):87-97 (1997) for Saccharomyces. Yeast plasmids have a selectable marker and an origin of replication, also known as Autonomously Replicating Sequences (ARS). In addition certain plasmids may also contain a centromeric sequence. These centromeric plasmids are generally a single or low copy plasmid. Plasmids without a centromeric sequence and utilizing either a 2 micron (S. cerevisiae) or 1.6 micron (K lactis) replication origin are high copy plasmids. The selectable marker can be either prototrophic, such as HIS3, TRP1, LEU2, URA3 or ADE2, or antibiotic resistance, such as, bar, ble, hph, or kan.

[0169] A nucleic acid of the disclosure can be amplified using cDNA, mRNA or alternatively, genomic DNA, as a template and appropriate oligonucleotide primers according to standard PCR amplification techniques and those procedures described in the Examples section below. The nucleic acid so amplified can be cloned into an appropriate vector and characterized by DNA sequence analysis. Furthermore, oligonucleotides corresponding to nucleotide sequences can be prepared by standard synthetic techniques, e.g., using an automated DNA synthesizer.

[0170] It is also understood that an isolated nucleic acid molecule encoding a polypeptide homologous to the enzymes described herein can be created by introducing one or more nucleotide substitutions, additions or deletions into the nucleotide sequence encoding the particular polypeptide, such that one or more amino acid substitutions, additions or deletions are introduced into the encoded protein. Mutations can be introduced into the polynucleotide by standard techniques, such as site-directed mutagenesis and PCR-mediated mutagenesis. In contrast to those positions where it may be desirable to make a non-conservative amino acid substitutions (see above), in some positions it is preferable to make conservative amino acid substitutions. A “conservative amino acid substitution” is one in which the amino acid residue is replaced with an amino acid residue having a similar side chain. Families of amino acid residues having similar side chains have been defined in the art. These families include amino acids with basic side chains (e.g., lysine, arginine, histidine), acidic side chains (e.g., aspartic acid, glutamic acid), uncharged polar side chains (e.g., glycine, asparagine, glutamine, serine, threonine, tyrosine, cysteine), nonpolar side chains (e.g., alanine, valine, leucine, isoleucine, proline, phenylalanine, methionine, tryptophan), beta-branched side chains (e.g., threonine, valine, isoleucine) and aromatic side chains (e.g., tyrosine, phenylalanine, tryptophan, histidine).

### Identification of Genes in a Host Microorganism

[0171] Any method can be used to identify genes that encode for enzymes with a specific activity. Generally, homologous or analogous genes with similar activity can be identified by functional, structural, and/or genetic analysis. In most cases, homologous or analogous genes with similar activity will have functional, structural, or genetic similarities. Techniques known to those skilled in the art may be suitable to identify homologous genes and homologous enzymes. Generally, analogous genes and/or analogous enzymes can be identified by functional analysis and will have functional similarities. Techniques known to those skilled in the art may be suitable to identify analogous genes and analogous enzymes. For example, to identify homologous or analogous genes, proteins, or enzymes, techniques may include, but not limited to, cloning a gene by PCR using primers based on a published sequence of a gene/enzyme or by degenerate PCR using degenerate primers designed to amplify a conserved region among a gene. Further, one skilled in the art can use techniques to identify homologous or analogous genes, proteins, or enzymes with functional homology or similarity. Techniques include examining a cell or cell culture for the catalytic activity of an enzyme through in vitro enzyme assays for said activity, then isolating the enzyme with said activity through purification, determining the protein sequence of the enzyme through techniques such as Edman degradation, design of PCR primers to the likely nucleic acid sequence, amplification of said DNA sequence through PCR, and cloning of said nucleic acid sequence. To identify homologous or analogous genes with similar activity, techniques also include comparison of data concerning a candidate gene or enzyme with databases such as BRENDA, KEGG, or MetaCYC. The candidate gene or enzyme may be identified within the above mentioned databases in accordance with the teachings herein. Furthermore, enzymatic activity can be determined phenotypically. For example, ethanol production under fermentative conditions can be assessed. A lack of ethanol production may be indicative of a microorganism lacking an alcohol dehydrogenase.

### Genetic Insertions and Deletions

[0172] Any method can be used to introduce a nucleic acid molecule into the chromosomal DNA of a microorganism and many such methods are well known. For example, lithium acetate transformation and electroporation are common methods for introducing nucleic acid into yeast microorganisms. See, e.g., Gietz et al., Nucleic Acids Res. 27:69-74 (1992); Ito et al., J. Bacterol. 153:163-168 (1983); and Becker and Guarente, Methods in Enzymology 194:182-187 (1991).

[0173] In an embodiment, the integration of a gene of interest into a DNA fragment or target gene of a yeast microorganism occurs according to the principle of homologous recombination. According to this embodiment, an integration cassette containing a module comprising at least one yeast marker gene and/or the gene to be integrated (internal module) is flanked on either side by DNA fragments homologous to those of the ends of the targeted integration site (recombinogenic sequences). After transforming the yeast with the cassette by appropriate methods, a homologous recombination between the recombinogenic sequences may result in the internal module replacing the chromosomal region in between the two sites of the genome corresponding to the recombinogenic sequences of the integration cassette. (Orr-Weaver et al., PNAS USA 78:6354-6358 (1981))

[0174] In an embodiment, the integration cassette for integration of a gene of interest into a yeast microorganism includes the heterologous gene under the control of an appropriate promoter and terminator together with the selectable marker flanked by recombinogenic sequences for integration of a heterologous gene into the yeast chromosome. In an embodiment, the heterologous gene includes an appropriate native gene desired to increase the copy number of a native gene(s). The selectable marker gene can be any marker gene used in yeast, including but not limited to, HIS3, TRP1, LEU2, URA3, bar, ble, hph, and kan. The recombinogenic sequences can be chosen at will, depending on the desired integration site suitable for the desired application.

[0175] Additionally, in an embodiment pertaining to yeast microorganisms, certain introduced marker genes are removed from the genome using techniques well known to those skilled in the art. For example, URA3 marker loss can be obtained by plating URA3 containing cells in FOA (5-fluoro-orotic acid) containing medium and selecting for FOA resistant colonies (Boeke, J. et al, 1984, Mol. Gen. Genet, 197, 345-47).

[0176] Integration of all the genes of a metabolic pathway that lead to a product into the genome of the production strain eliminates the need of a plasmid expression system, as the enzymes are produced from the chromosome. The integration of pathway genes avoids loss of productivity over time due to plasmid loss. This is important for long fermentation times and for fermentations in large scale where the seed train is long and the production strain has to go through many doublings from the first inoculation to the end of the large scale fermentation.

[0177] Integrated genes are maintained in the strain without selection. This allows the construction of production strains that are free of marker genes which are commonly used for maintenance of plasmids. Production strains with integrated pathway genes can contain minimal amounts of foreign DNA since there are no origins of replication and other non coding DNA necessary that have to be in plasmid based systems. The biocatalyst with integrated pathway genes improves the yield of a production process because it avoids energy and carbon requiring processes. These processes are the replication of many copies of plasmids and the production of non-pathway active proteins like marker proteins in the production strain.

[0178] The expression of pathway genes on multi-copy plasmids can lead to overexpression phenotypes for certain genes. These phenotypes can be growth retardation, inclusion bodies, and cell death. Therefore the expression levels of genes on multi copy plasmids has to be controlled effectively by using inducible expression systems, optimizing the time of induction of said expression system, and optimizing the amount of inducer provided. The time of induction has to be correlated to the growth phase of the biocatalyst, which can be followed by measuring of optical density in the fermentation broth. A biocatalyst that has all pathway genes integrated on its chromosome is far more likely to allow constitutive expression since the lower number of gene copies avoids over expression phenotypes.

### Overexpression of Heterologous Genes

[0179] Methods for overexpressing a polypeptide from a native or heterologous nucleic acid molecule are well known. Such methods include, without limitation, constructing a nucleic acid sequence such that a regulatory element promotes the expression of a nucleic acid sequence that encodes the desired polypeptide. Typically, regulatory elements are DNA sequences that regulate the expression of other DNA sequences at the level of transcription. Thus, regulatory elements include, without limitation, promoters, enhancers, and the like. For example, the exogenous genes can be under the control of an inducible promoter or a constitutive promoter. Moreover, methods for expressing a polypeptide from an exogenous nucleic acid molecule in yeast are well known. For example, nucleic acid constructs that are used for the expression of exogenous polypeptides within Kluyveromyces and Saccharomyces are well known (see, e.g., U.S. Pat. Nos. 4,859,596 and 4,943,529, for Kluyveromyces and, e.g., Gellissen et al., Gene 190(1):87-97 (1997) for Saccharomyces). Yeast plasmids have a selectable marker and an origin of replication. In addition certain plasmids may also contain a centromeric sequence. These centromeric plasmids are generally a single or low copy plasmid. Plasmids without a centromeric sequence and utilizing either a 2 micron (S. cerevisiae) or 1.6 micron (K lactis) replication origin are high copy plasmids. The selectable marker can be either prototrophic, such as HIS3, TRP1, LEU2, URA3 or ADE2, or antibiotic resistance, such as, bar, ble, hph, or kan.

[0180] In another embodiment, heterologous control elements can be used to activate or repress expression of endogenous genes. Additionally, when expression is to be repressed or eliminated, the gene for the relevant enzyme, protein or RNA can be eliminated by known deletion techniques.

[0181] As described herein, any yeast within the scope of the disclosure can be identified by selection techniques specific to the particular enzyme being expressed, over-expressed or repressed. Methods of identifying the strains with the desired phenotype are well known to those skilled in the art. Such methods include, without limitation, PCR, RT-PCR, and nucleic acid hybridization techniques such as Northern and Southern analysis, altered growth capabilities on a particular substrate or in the presence of a particular substrate, a chemical compound, a selection agent and the like. In some cases, immunohistochemistry and biochemical techniques can be used to determine if a cell contains a particular nucleic acid by detecting the expression of the encoded polypeptide. For example, an antibody having specificity for an encoded enzyme can be used to determine whether or not a particular yeast cell contains that encoded enzyme. Further, biochemical techniques can be used to determine if a cell contains a particular nucleic acid molecule encoding an enzymatic polypeptide by detecting a product produced as a result of the expression of the enzymatic polypeptide. For example, transforming a cell with a vector encoding acetolactate synthase and detecting increased cytosolic acetolactate concentrations compared to a cell without the vector indicates that the vector is both present and that the gene product is active. Methods for detecting specific enzymatic activities or the presence of particular products are well known to those skilled in the art. For example, the presence of acetolactate can be determined as described by Hugenholtz and Starrenburg, Appl. Microbiol. Biotechnol. 38:17-22 (1992).

### Reduction of Enzymatic Activity

[0182] Host microorganisms within the scope of the invention may have reduced enzymatic activity such as reduced alcohol dehydrogenase activity. The term “reduced” as used herein with respect to a particular enzymatic activity refers to a lower level of enzymatic activity than that measured in a comparable host cell of the same species. Thus, host cells lacking alcohol dehydrogenase activity are considered to have reduced alcohol dehydrogenase activity since most, if not all, comparable host cells of the same species have at least some alcohol dehydrogenase activity. Such reduced enzymatic activities can be the result of lower enzyme expression level, lower specific activity of an enzyme, or a combination thereof. Many different methods can be used to make host cells having reduced enzymatic activity. For example, a host cell can be engineered to have a disrupted enzyme-encoding locus using common mutagenesis or knock-out technology. See, e.g., Methods in Yeast Genetics (1997 edition), Adams, Gottschling, Kaiser, and Stems, Cold Spring Harbor Press (1998), Datsenko and Wanner, Proc. Natl. Acad. Sci. USA 97, 6640-6645, 2000.

[0183] In addition, certain point-mutation(s) can be introduced which results in an enzyme with reduced activity.

[0184] Alternatively, antisense technology can be used to reduce enzymatic activity. For example, host cells can be engineered to contain a cDNA that encodes an antisense molecule that prevents an enzyme from being made. The term “antisense molecule” as used herein encompasses any nucleic acid molecule that contains sequences that correspond to the coding strand of an endogenous polypeptide. An antisense molecule also can have flanking sequences (e.g., regulatory sequences). Thus antisense molecules can be ribozymes or antisense oligonucleotides. A ribozyme can have any general structure including, without limitation, hairpin, hammerhead, or axhead structures, provided the molecule cleaves RNA.

[0185] Host cells having a reduced enzymatic activity can be identified using many methods. For example, host cells having reduced alcohol dehydrogenase activity can be easily identified using common methods, which may include, for example, measuring ethanol formation via gas chromatography.

### Increase of Enzymatic Activity

[0186] Host microorganisms of the invention may be further engineered to have increased activity of enzymes. The term “increased” as used herein with respect to a particular enzymatic activity refers to a higher level of enzymatic activity than that measured in a comparable yeast cell of the same species. For example, overexpression of a specific enzyme can lead to an increased level of activity in the cells for that enzyme. Increased activities for enzymes involved in glycolysis or the isobutanol pathway would result in increased productivity and yield of isobutanol.

[0187] Methods to increase enzymatic activity are known to those skilled in the art. Such techniques may include increasing the expression of the enzyme by increasing plasmid copy number and/or use of a stronger promoter and/or use of activating riboswitches, introduction of mutations to relieve negative regulation of the enzyme, introduction of specific mutations to increase specific activity and/or decrease the Km for the substrate, or by directed evolution. See, e.g., Methods in Molecular Biology (vol. 231), ed. Arnold and Georgiou, Humana Press (2003).

### Microorganism in Detail

[0188] Microorganism Characterized by Production of Isobutanol from Pyruvate Via an Isobutanol Pathway Expressed in the Mitochondria at High Yield

[0189] For a biocatalyst to produce isobutanol most economically, it is desired to produce a high yield. Preferably, the only product produced is isobutanol. Extra products lead to a reduction in product yield and an increase in capital and operating costs, particularly if the extra products have little or no value. Extra products also require additional capital and operating costs to separate these products from isobutanol.

[0190] The microorganism may convert one or more carbon sources derived from biomass into isobutanol with a yield of greater than 5% of theoretical. In one embodiment, the yield is greater than 10%. In one embodiment, the yield is greater than 50% of theoretical.

[0191] In one embodiment, the yield is greater than 60% of theoretical. In another embodiment, the yield is greater than 70% of theoretical. In yet another embodiment, the yield is greater than 80% of theoretical. In yet another embodiment, the yield is greater than 85% of theoretical. In yet another embodiment, the yield is greater than 90% of theoretical. In yet another embodiment, the yield is greater than 95% of theoretical. In still another embodiment, the yield is greater than 97.5% of theoretical.

[0192] More specifically, the microorganism converts glucose, which can be derived from biomass into isobutanol with a yield of greater than 5% of theoretical. In one embodiment, the yield is greater than 10% of theoretical. In one embodiment, the yield is greater than 50% of theoretical. In one embodiment the yield is greater than 60% of theoretical. In another embodiment, the yield is greater than 70% of theoretical. In yet another embodiment, the yield is greater than 80% of theoretical. In yet another embodiment, the yield is greater than 85% of theoretical. In yet another embodiment the yield is greater than 90% of theoretical. In yet another embodiment, the yield is greater than 95% of theoretical. In still another embodiment, the yield is greater than 97.5% of theoretical

Microorganism Characterized by Production of Isobutanol from Pyruvate Via an Isobutanol Pathway Expressed in the Mitochondria of a PDC-Minus Yeast

[0193] In yeast, the conversion of pyruvate to acetaldehyde is a major drain on the pyruvate pool (FIG. 2), and, hence, a major source of competition with the isobutanol pathway. This reaction is catalyzed by the pyruvate decarboxylase (PDC) enzyme. Reduction of this enzymatic activity in the yeast microorganism results in an increased availability of pyruvate and reducing equivalents to the isobutanol pathway and may improve isobutanol production and yield in a yeast microorganism that expresses a pyruvate-dependent isobutanol pathway.

[0194] Reduction of PDC activity can be accomplished by 1) mutation or deletion of a positive transcriptional regulator for the structural genes encoding for PDC or 2) mutation or deletion of all PDC encoding genes in a given organism. For example, in S. cerevisiae, the PDC2 gene, which encodes for a positive transcriptional regulator of PDC1, 5, 6 genes can be deleted; a S. cerevisiae in which the PDC2 gene is deleted is reported to have only ˜10% of wildtype PDC activity (Hohmann, Mol Gen Genet, 241:657-666 (1993)). Alternatively, for example, all structural genes for PDC (e.g. in S. cerevisiae, PDC1, PDC5, and PDC6, or in K. marxianus, PDC1) are deleted.

[0195] In addition to reduced ability to convert pyruvate to acetaldehyde, the yeast microorganism is engineered to have increased ability to convert ketoisovalerate to isobutyraldehyde. In many yeast microorganisms, both of these reactions can be catalyzed by the enzyme, pyruvate decarboxylase. For example, the ability to convert pyruvate to acetaldehyde is reduced as described above and the ketoisovalerate to isobutyraldehyde conversion is increased by introducing an enzyme that has a higher specificity to ketoisovalerate, such as the KIVD enzyme from L. lactis. Specifically, the microorganism has sufficiently low ability to convert pyruvate to acetaldehyde and sufficiently high ability to convert ketoisovalerate to isobutyraldehyde to result in an isobutanol yield of greater than 50%, 60%, 70%, 80%, 90%, 95%, 97.5% of theoretical.

[0196] Crabtree-positive yeast strains such as Saccharomyces.cerevisiae strain that contains disruptions in all three of the PDC alleles no longer produce ethanol by fermentation. However, a downstream product of the reaction catalyzed by PDC, acetyl-CoA, is needed for anabolic production of necessary molecules. Therefore, the Pdc-mutant is unable to grow solely on glucose, and requires a two-carbon carbon source, either ethanol or acetate, to synthesize acetyl-CoA. (Flikweert M T, de Swaaf M, van Dijken J P, Pronk J T. FEMS Microbiol Lett. 1999 May 1; 174(1):73-9. PMID:10234824 and van Maris A J, Geertman J M, Vermeulen A, Groothuizen M K, Winkler A A, Piper M D, van Dijken J P, Pronk J T. Appl Environ Microbiol. 2004 January; 70(1):159-66. PMID: 14711638).

[0197] Thus, in an embodiment, such a Crabtree-positive yeast strain may be evolved to generate variants of the PDC mutant that do not have the requirement for a two-carbon molecule and has a growth rate similar to wild-type on glucose. Any method, including chemostat evolution or serial dilution may be utilized to generate variants of strains with deletion of three PDC loci that can grow on glucose as the sole carbon source at a rate similar to wild type.

[0198] Most of the enzymatic activities that are needed for the metabolic conversion of pyruvate to isobutanol are present in yeast. ALS, KARI and DHAD activities are present as part of the branched chain amino acid biosynthetic pathway. These three enzymes are localized in the yeast mitochondria. Ketoacid decarboxylase (KIVD) activity is present in the yeast cytosol. The native S. cerevisiae enzymes catalyzing this conversion are Pdc1p, Pdc5p, and Pdc1p, Aro10p and Thi3p. THI3 is annotated as coding for an -ketoisocaproate decarboxylase and its gene product may have a role in catabolism of amino acids to long-chain and complex alcohols. It was shown that Thi3p is mainly responsible for the decarboxylation of -ketoisocaproate to isoamyl alcohol (Dickinson J R, et al. The Journal of Biological Chemistry 1997, 278:8028-8034). Deletion of THI3 did not have an effect on isobutanol production from valine (Dickinson, J R, et al. The Journal of Biological Chemistry 1998, 273:25751-25756). THI3 is required for expression of enzymes involved in thiamine biosynthesis. Aro10p is a phenylpyruvate decarboxylase, catalyzing the decarboxylation of phenylpyruvate to phenylacetaldehyde, which is the first specific step in the Ehrlich pathway. Aro10p was shown to have activity with ketoisovalerate when produced in E. coli (WO 2008/098227). The overexpression of ARO10 in S. cerevisiae indicated the involvement of posttranscriptional regulation and/or a second protein in the Aro10p dependent broad substrate specificity decarboxylase activity (Vuralhan, Z., et al. 2005, Appl. and Environ. Microbiol. 71: 3276-3284). Isobutanol production from ketoisovalerate in S. cerevisiae is catalyzed by any of the three PDC enzymes (Dickinson, J R, et al. 1998, J. Biol. Chem. 273: 25751-25756). The last step of the isobutanol pathway is catalyzed by an isobutyraldehyde dehydrogenase. In yeast there are several enzymes that potentially catalyze this reaction. Adh5p, Adh6p, and Adh7p are NADPH dependent and Adh1p, Adh2p, Adh3p, and Adh4p are NADH dependent. Adh1p, Adh2p, Adh5p, Adh6p, and Adh7p are cytosolic and Adh3p, and Adh4 are mitochondrial. An assessment of substrate specificity of Adh1p, Adh2p, Adh6p, and Adh7p showed that Adh7p shows the highest activity with isobutyraldehyde. Adh3p is involved in the acetaldehyde ethanol shuttle that transfers mitochondrial NADH into the cytosol under anaerobic conditions. Adh1-5proteins are all involved in ethanol metabolism. Sfa1p is localized in the cytosol as well as in the mitochondria. Sfa1p is involved in the formation of long chain and complex alcohols. It is a bifunctional enzyme which also reduces hydroxymethylfurfural using the cofactor NADH. This indicates that all ADHs that are expressed in the yeast mitochondria are NADH-dependent.

[0199] For the entire isobutanol pathway to be expressed in the yeast mitochondria KIVD has to be expressed in this compartment. All other activities are already natively expressed in the mitochondria. However to insure sufficient capacity of the pathway and to avoid the down regulation of the native expression levels of the pathway enzymes all or some of the pathway enzymes can be overexpressed. The overexpression of the enzymes that are already natively targeted to the mitochondria can be done by expressing the genes under the control of constitutive yeast promoters like P_{ADH}, or P_{PDC1}. Expression levels can be adjusted by strength of promoter or copy number. For the expression of ARO10 or THI3, which are not natively localized to the mitochondria a yeast mitochondrial targeting sequence (MTS) has to be added to the coding sequence of the genes of interest. Several MTS have been described in the literature. Examples are the Cox4p MTS and the MTS of ScHMI1p. The MTS of proteins can be predicted using software that detects the typical arrangement of charged and hydrophobic residues that can be found in proteins targeted to the mitochondria. These programs also predict the likely localization of heterologous proteins in a yeast host cell. Examples of such programs are mitoprot and psort.

[0200] Addition of yeast mitochondrial targeting sequences is likely necessary for the mitochondrial expression of homologs of the isobutanol pathway enzymes that are not native to the host organism. These leader sequences are 10-80 amino acids long and are usually on the N-terminus of the proteins although one native example for a C-terminal leader sequence has been reported. Also, N-terminal leader sequences have been shown to be functional if attached to the C-terminus of a protein. In addition to native leader sequences artificial leader sequences have been constructed that were functional but did not reach the efficiency of their natural counterparts. Leader sequences have a secondary structure that leads to an alpha helix that is positively charged on one side and hydrophobic on the opposite side. The charged as well as the hydrophobic side of the helix facilitate the transfer of the protein through the two mitochondrial membranes into the mitochondrial matrix. Once the leader sequence is inside the matrix it is removed from the protein by the mitochondrial protein peptidase (MPP) activity. The specificity of the protease is such that a basic amino acid, in most cases arginine is found at the −2 position of the MPP cleavage site. In addition of this recognition of sequence close to its cleavage site MPP also recognizes the amino terminal targeting sequence. In some cases the leader sequence is cut twice. After the cleavage by MPP the protein is cut again by mitochondrial intermediate peptidase (MIP) or the terminal amino acid after the MPP cut is removed by ICP55. N-terminal as well as C-terminal extensions of a protein sequence can impair enzymatic activity as well as protein folding. Depending on the properties of each enzyme a decision can be made on whether a 3′ or a 5′ attachment of the leader sequence is more likely to render a correctly folded and active protein.

[0201] Overexpression of isobutanol pathway enzymes in the mitochondria of a yeast cell can cause overexpression phenotypes ranging from growth retardation to non-viability. To avoid these phenotypes and to enable fast cell growth prior to the isobutanol production phase the expression of the pathway genes can be limited and controlled. Limitation of the expression level can be accomplished by the use of weak promoters and by reduction of the copy number of the expression cassette. However these measures can limit the productivity of the strain if the pathway enzyme activity is limiting the isobutanol productivity of the strain. Control of expression can be accomplished by use of inducible promoters. Repression of the expression of one or more pathway genes during growth allows for fast production of biomass. Induction of the pathway enzymes allows for high productivity during isobutanol production. Inducible promoters that are useful in yeast comprise P_{MET3}, and P_{MET17}, which are repressed by methionine, P_{CUP} which is induced by copper, P_{PDC1}, and P_{ADH1} which are induced by glucose. Given are the gene and promoter names for Saccharomyces cerevisiae. To insure proper regulation native promoters should be used in each of the different host organisms.

[0202] In addition to or separate from the deletion or reduction in the activity of PDC, the recombinant microorganisms of the present invention may further include the deletion or reduction of the activity of additional enzymes that (a) directly consume a precursor of the product, e.g. an isobutanol precursor, (b) indirectly consume a precursor of the product, e.g. of isobutanol, or (c) repress the expression or function of a pathway that supplies a precursor of the product, e.g. of isobutanol. These enzymes include glycerol-3-phosphate dehydrogenase (encoded, e.g. by GPD1 or GPD2 of S. cerevisiae) an alcohol dehydrogenase (encoded, e.g., by adhE of E. coli or ADH1, ADH2, ADH3, ADH4, ADH5, ADH6, or ADH7 of S. cerevisiae), 2-isopropylmalate synthase (encoded, e.g. by LEU4 or LEU9 of S. cerevisiae), valine transaminase (encoded, e.g. by BAT1 or BAT2 of S. cerevisiae), Threonine deaminase (encoded, e.g. by ilvA of E. coli or CHA1 or ILV1 of S. cerevisiae), or any combination thereof, to increase the availability of pyruvate or reduce enzymes that compete for a metabolite in a desired biosynthetic pathway.

### Microorganism Characterized by Balancing Cofactor Usage

[0203] The ideal production microorganism produces a desirable product at close to theoretical yield. For example the ideal isobutanol producing organism produces isobutanol according to the following equation:

glucose→isobutanol+2CO₂+H₂O

[0204] Accordingly, 66% of the glucose carbon results in isobutanol, while 33% is lost as CO₂. In exemplary metabolic pathways for the conversion of pyruvate to isobutanol described by Atsumi et al. (Atsumi et al., Nature, 2008 Jan. 3; 451(7174):86-9; International Patent Application No PCT/US2008/053514, which is herein incorporated by reference) two of the five enzymes used to convert pyruvate into isobutanol according to the metabolic pathway outlined in FIG. 1 require the reduced cofactor nicotinamide adenine dinucleotide phosphate (NADPH). NADPH is produced only sparingly by the cell—the reduced cofactor nicotinamide adenine dinucleotide (NADH) is the preferred equivalent. Respiration is required to produce NADPH in the large quantities required to support high-level production of isobutanol.

[0205] Even if competing pathways can be eliminated or reduced in activity by metabolic engineering, yield is limited to about 83% of theoretical. Carbon loss to carbon dioxide (CO₂) remains the main limitation on yield in the aforementioned metabolic pathway for the production of isobutanol.

[0206] In a metabolically engineered cell utilizing the aforementioned metabolic pathway the production of isobutanol from glucose results in an imbalance between the cofactors reduced during glycolysis and the cofactors oxidized during the conversion of pyruvate to isobutanol. While glycolysis produces 2 NADH, the isobutanol pathway consumes 2 NADPH. This leads to a deficit of 2 NADPH and overproduction of 2 NADH per isobutanol molecule produced, a state described henceforth as cofactor imbalance.

[0207] The terms “NADH dependent” or “NADPH dependent”, refer to the property of an enzyme to preferentially use either of the redox cofactors. A NADH dependent enzyme has a higher catalytic efficiency (k_{cat}/K_{M}) with the cofactor NADH than with the cofactor NADPH as determined by in vitro enzyme activity assays.

[0208] The terms “cofactor balance” or “balanced with respect to cofactor usage” refer to a recombinant microorganism comprising a metabolic pathway converting a carbon source to a fermentation product and a modification that leads to the regeneration of all redox cofactors within the recombinant microorganism producing said fermentation product from a carbon source and wherein the re-oxidation or re-reduction of said redox cofactors does not require the pentose phosphate pathway, the TCA cycle or the generation of additional fermentation products.

[0209] Stated another way, the terms “cofactor balance” or “balanced with respect to cofactor usage” can refer to an advantageous modification that leads to the regeneration of all redox cofactors within the recombinant microorganism producing a fermentation product from a carbon source and wherein said re-oxidation or re-reduction of all redox cofactors does not require the production of byproducts or co-products.

[0210] Stated another way, the terms “cofactor balance” or “balanced with respect to cofactor usage” can refer to an advantageous modification that leads to the regeneration of all redox cofactors within the recombinant microorganism producing a fermentation product from a carbon source under anaerobic conditions and wherein the production of additional fermentation products is not required for re-oxidation or re-reduction of redox cofactors.

[0211] Stated another way, the terms “cofactor balance” or “balanced with respect to cofactor usage” can refer to an advantageous modification that leads to the regeneration of all redox cofactors within the recombinant microorganism producing a fermentation product from a carbon source and wherein said modification increases production of said fermentation product under anaerobic conditions compared to the parental or wild-type microorganism and wherein additional fermentation products are not required for the regeneration of said redox cofactors.

[0212] The terms “partial cofactor balance” or “partially balanced with respect to cofactor usage” refer to a recombinant microorganism comprising a metabolic pathway converting a carbon source to a fermentation product and a modification that leads to the regeneration of redox cofactors within the recombinant microorganism producing said fermentation product from a carbon source and wherein the re-oxidation or re-reduction of said redox cofactors shows a reduced requirement of the pentose phosphate pathway, the TCA cycle or the generation of additional fermentation products when compared to the same recombinant microorganism without said modification.

[0213] Stated another way, the terms “partial cofactor balance” or “partially balanced with respect to cofactor usage” can refer to an advantageous modification that leads to the regeneration of redox cofactors within the recombinant microorganism producing a fermentation product from a carbon source and wherein said re-oxidation or re-reduction of all redox cofactors produces less byproducts or co-products when compared to the same recombinant microorganism without said advantageous modification.

[0214] The cell has several options for resolving a cofactor imbalance. One is to change the relative fluxes going from glucose through glycolysis and through the pentose phosphate pathway (PPP). For each glucose molecule metabolized through the PPP, 2 NADPH are generated in addition to the 2 NADH that are generated through glycolysis (a total of 4 reducing equivalents). Therefore, use of the PPP results in the generation of excess reducing equivalents since only two reducing equivalents are consumed during the production of isobutanol. Flux through the PPP results in the loss of one additional molecule of CO₂ per molecule of glucose consumed, which limits the yield of isobutanol that can be achieved. The production of excess reducing equivalents leads to the production of reduced byproducts or it necessitates respiration.

[0215] Another way the cell can generate NADPH is via the TCA cycle. Flux through the TCA cycle results in carbon loss through CO₂ and in production of NADH in addition to the NADPH required for the isobutanol pathway. The excess NADH would have to be utilized for energy production through respiration or for byproduct formation. Thus any flux through the TCA cycle will reduce the yield of the isobutanol production and it will require oxygen.

[0216] In addition to this basic cofactor imbalance, in yeast, NAD(P)H is not able to efficiently cross the mitochondrial membrane. Thus, to make available reducing equivalents for the isobutanol pathway in the mitochondria, an NADH shuttle (reviewed in Bakker et al., 2001, FEMS Microbiology Reviews 25:15-37) could be used or under aerobic conditions, the TCA cycle can be used to generate NADH in the mitochondria. An example of an NADH shuttle is the ethanol/acetaldehyde shuttle. An alcohol dehydrogenase (ADH) in the cytosol can oxidize an NADH to NAD+ while converting an acetaldehyde to ethanol. As both ethanol and acetaldehyde freely transverse membranes, generated ethanol can be used to reduce an NAD+ to NADH in the mitochondria by a mitochondrially localized ADH and generate acetaldehyde. In this fashion, a cytosolic NADH can be shuttled into the mitochondria. The use of the TCA cycle or the NADH shuttles would still result in a cofactor imbalance in the mitochondria as the isobutanol pathway consumes NADPH.

[0217] An economically competitive isobutanol process requires a high yield from a carbon source. Lower yield means that more feedstock is required to produce the same amount of isobutanol. Feedstock cost is the major component of the overall operating cost, regardless of the nature of the feedstock and its current market price. From an economical perspective, this is important because the cost of isobutanol is dependent on the cost of the biomass-derived sugars. An increase in feedstock cost results in an increase in isobutanol cost.

[0218] Thus, in one embodiment of the invention, a recombinant microorganism comprising a modification of the metabolic pathway for the production of a fermentation product wherein said modification balances the cofactor usage of the recombinant microorganism producing said fermentation product from a carbon source is provided.

[0219] In a specific aspect, a microorganism is provided in which cofactor usage is balanced during the production of isobutanol, in this case, production of isobutanol from pyruvate utilizes the same cofactor that is produced during glycolysis and shuttled into the mitochondria.

[0220] In another embodiment, a microorganism is provided in which cofactor usage is balanced during the production of a fermentation product and the microorganism produces the fermentation product at a higher yield compared to a modified microorganism in which the cofactor usage in not balanced.

[0221] In a specific aspect, a microorganism is provided in which cofactor usage is balanced during the production of isobutanol and the microorganism produces isobutanol at a higher yield compared to a modified microorganism in which the cofactor usage in not balanced.

[0222] In yet another embodiment, a modified microorganism in which cofactor usage is balanced during the production of a fermentation product may allow the microorganism to produce said fermentation product under anaerobic conditions, conditions under which a modified microorganism in which the cofactor usage in not balanced during production of a fermentation product may not be able to produce a fermentation product.

[0223] In a specific aspect, a modified microorganism in which cofactor usage is balanced during the production of isobutanol may allow the microorganism to produce said isobutanol under anaerobic conditions, conditions under which a modified microorganism in which the cofactor usage is not balanced during production of isobutanol may not be able to produce isobutanol.

[0224] One compound to be produced by the recombinant microorganism according to the present invention is isobutanol. However, the present invention is not limited to isobutanol. The invention may be applicable to any metabolic pathway that is imbalanced with respect to cofactor usage. One skilled in the art is able to identify pathways that are imbalanced with respect to cofactor usage and apply this invention to provide recombinant microorganisms in which the same pathway is balanced with respect to cofactor usage. One skilled in the art will recognize that the identified pathways may be of longer or shorter length, contain more or fewer genes or proteins, and require more or fewer cofactors than the exemplary isobutanol pathway. Further, one skilled in the art will recognize that in certain embodiments, such as a recombinant microbial host that produces an excess of NADPH, certain embodiments of the present invention may be adapted to convert NADPH to NADH.

Microorganism Characterized by Providing Cofactor Balance Via KARI and ADH that are Able to Utilize NADH.

[0225] As detailed above, production of isobutanol from glucose using the aforementioned pathway in the mitochondria results in cofactor imbalance as 2 NADHs are generated in the cytosol via glycolysis and 2 NADPHs are consumed in the mitochondria by the isobutanol pathway. Yeast cells are able to transfer the reducing equivalents from the cytosol to the mitochondria via an NADH shuttle. This results in an NADH in the mitochondria, which would still result in a cofactor imbalance with the isobutanol pathway. This imbalance can be resolved by the use of a mitochondrial isobutanol pathway that consumes NADH instead of NADPH. For the mitochondrial isobutanol pathway to consume NADH, the NADPH dependent enzymes, KARI and ADH can be replaced by either an NADH dependent homolog or an enzyme that has been engineered to use NADH.

[0226] The NADH shuttles that are available to transfer cytosolic NADH into the mitochondria have a limited capacity and might limit the productivity of a yeast isobutanol production strain if said strain produces all isobutanol pathway enzymes in the mitochondria. Isobutyraldehyde is assumed to be membrane permeable. Isobutyraldehyde produced in the mitochondrial matrix can transverse the mitochondrial membrane and can be reduced to isobutanol by a cytosolic ADH. If an NADH dependent ADH is used in the isobutanol pathway, localization of said ADH to the cytosol instead of the mitochondrial matrix can reduce the flux through the NADH shuttle pathways by half. In this case 50% of the reduced cofactor consumed in the isobutanol pathway is regenerated in the same compartment where it is oxidized. This may improve productivity of an isobutanol production strain. This approach of expressing the isobutyraldehyde reducing activity in the cytosol is also viable for NADPH dependent ADHs, since most of the NADPH turnover in yeast cells occurs in the cytosol.

[0227] In yeast, an NADPH dependent KARI is expressed endogenously. As the endogenous enzyme could also function in the mitochondrial isobutanol pathway and consume NADPH, it would results in an imbalance in the cofactor usage. Therefore, the gene encoding this enzyme would be deleted and the activity complemented by the NADH dependent enzyme. Native yeast Ilv5p has two functions. One is the catalytic KARI activity and the other is stabilization of mitochondrial DNA. Many KARIs such as for example the bacterial homologs do not have the DNA stabilizing function. If the NADH dependent KARI that is used in the isobutanol producing yeast does not provide the DNA stabilizing function a mutant ILV5 which has lost its catalytic KARI activity but maintains its DNA stabilizing functionality can be used to ensure mitochondrial stability. Such mutants are known in the art. Alternatively a host strain containing wild-type ILV5 can be used to maintain mitochondrial DNA stability with a NADH dependent KARI overexpressed in addition. Exemplary NADH-dependent KARI enzymes are discussed and described in the commonly owned and co-pending U.S. application Ser. No. 12/610,784, hereby incorporated by reference in its entirety. There are two NADPH dependent alcohol dehydrogenases, Adh6p and Adh7p in S. cerevisiae, that are able to convert isobutyraldehyde to isobutanol. However, these enzymes are likely expressed in the cytosol of yeast and should not affect the cofactor balance in the mitochondria.

[0228] In one embodiment of the invention, a microorganism is provided in which the cofactor-dependent final step for the conversion of isobutyraldehyde to isobutanol is catalyzed by an NADH dependent alcohol dehydrogenase. In one specific embodiment, such an alcohol dehydrogenase may be encoded by the Drosophila melanogaster alcohol dehydrogenase (Accession: NT_{—}033779, Region: 14615555.14618902) (SEQ ID NO: 161) or homologs thereof. In another specific embodiment, such an alcohol dehydrogenase may be encoded by Lactococcus lactis adhA codon optimized for S. cerevisiae (Ll_adhA_coSc-1) (SEQ ID NO: 67) coding for L. lactis AdhA (SEQ ID NO: 68).

[0229] In one embodiment of this invention only one of the redox cofactor dependent conversions of the isobutanol pathway is catalyzed by an enzyme that is NADH dependent while the other enzyme is NADPH dependent. In a specific aspect the enzyme that is NADH dependent is the ADH converting isobutyraldehyde to isobutanol and the NADPH dependent enzyme is KARI converting acetolactate into dihydroxyisovalerate. This partial cofactor balance improves the yield of isobutanol production of a recombinant microorganism expressing an isobutanol pathway.

### Microorganism Characterized by Providing Cofactor Balance Via Malate Pathway

[0230] Production of isobutanol from glucose using the aforementioned pathway in the mitochondria results in cofactor imbalance as 2 NADHs are generated in the cytosol via glycolysis and 1 or 2 NADPHs are consumed in the mitochondria by the isobutanol pathway. Whether 1 or 2 redox cofactors are consumed in the mitochondria depends on the isobutanol pathway. If pyruvate is converted to isobutanol in the mitochondria as illustrated in FIGS. 2, 3, and 5 then 2 NAPH are consumed in this compartment. If the conversion of isobutyraldehyde to isobutanol takes place in the cytosol as is the case for the pathways illustrated in FIGS. 4, 6, 8, and 10 then one NADPH is consumed in the mitochondria. One approach to balance these cofactors is to introduce a bypass in which the NADHs in the cytosol is oxidized to generate a compound that is able to pass into the mitochondria and then for that compound to be utilized to reduce an NADP+ in the mitochondria. One such compound is malate. Malate can be transported into the mitochondria via the dicarboxylate carrier, Dic1p. Malate is generated in the cytosol from either pyruvate or phosphoenol pyruvate (PEP) via an intermediate, oxaloacetate (OAA). OAA is produced from pyruvate via Pyruvate carboxylase (Pyc1p or Pyc2p) or alternatively from PEP via phosphoenolpyruvate carboxylase (E. coli Ppc) or phosphoenolpyruvate carboxylkinase (Pck1). The conversion of OAA to malate by a malate dehydrogenase (Mdh2p) reoxidizes a cytosolic NADH. Malate in the mitochondria can then be converted to pyruvate using the mitochondrial malic enzyme, Mae1p, which in the process reduces an NADP+, thus generating a mitochondrial NADPH. Since 2 malate can be produced per glucose, 2 cytosolic NADHs are converted into 2 mitochondrial NADPHs by the use of this bypass.

[0231] Microorganism Characterized by Providing Cofactor Balance Via a Transhydrogenase

[0232] As detailed above, production of isobutanol from glucose using the aforementioned pathway in the mitochondria results in cofactor imbalance as 2 NADHs are generated in the cytosol via glycolysis and 2 NADPHs are consumed in the mitochondria by the isobutanol pathway. Yeast cells are able to transfer the reducing equivalents from the cytosol to the mitochondria via an NADH shuttle. This results in an NADH in the mitochondria, which would still result in a cofactor imbalance with the isobutanol pathway. This imbalance can be resolved by the use of a transhydrogenase.

[0233] Yeast do not contain transhydrogenases. The heterologous expression of bacterial, plant or other eukaryotic transhydrogenases in yeast can be used to provide cofactor balance. Previous attempts to express heterologous transhydrogenases in yeast resulted in the conversion of NADPH to NADH. The soluble transhydrogenase from Azotobacter vinelandii was functionally expressed in S. cerevisiae (Nissen, T L, et al. 2000 Yeast 16, 463-474.) to introduce an alternative pathway for the reoxidation of NADH with the goal of reducing glycerol production. The approach was unsuccessful because of the catalysis of the opposite reaction by the heterologous transhydrogenase. It was reported that the native soluble transhydrogenase in E. coli (SthA) catalyze the conversion of NADPH to NADH (Sauer, U., et al., 2004 The Journal of Biological Chemistry 279, 6613-6619.) The membrane bound transhydrogenase from E. coli coded by pntA and pntB was functionally expressed in S. cerevisiae (Anderlund et al., 1999 Applied and Environmental Microbiology 65, 2333-2340.) and it was observed that this enzyme also catalyzed the conversion of NADPH to NADH and hence was not useful for the reoxidation of NADH in the strains that were constructed. It was found that the transhydrogenase was inserted into the endoplasmic reticulum membrane. This targeting is the likely reason for the failure of the transhydrogenase to catalyze reoxidation of NADH, which is its native function in E. coli (Sauer, U., et al., The Journal of Biological Chemistry 2004 279 6613-6619.). The transhydrogenases that natively convert NADH to NADPH are generally membrane proteins that use the proton motive force to drive the reaction they are catalyzing. Bacterial transhydrogenases are in the cell membrane while plant and mammalian transhydrogenases are located in the inner mitochondrial membrane. For the heterologous transhydrogenase expression these enzymes can be targeted either to the cytoplasmic membrane or to the mitochondrial membrane in yeast. To achieve this leader sequences have to be added to the heterologous proteins. The mechanism of membrane targeting is well understood and the direction of normally cytosolic proteins to the mitochondria has been demonstrated. These targeting mechanisms are well conserved throughout the eukaryotes as demonstrated by the use of plant mitochondrial targeting sequences in yeast. Eukaryotic transhydrogenases can be expressed in yeast with their native targeting and sorting sequences. Bacterial transhydrogenases can be fused to mitochondrial targeting and membrane sorting sequences that have been characterized in yeast inner membrane proteins. For the expression of a transhydrogenase in yeast a fungal source organism is preferred and among the fungi an ascomycete is preferred. Several transhydrogenases have been found by homology searches. Preferred source organisms for the transhydrogenase include Neurospora crassa, Aspergillus clavatus, Aspergillus oryzae, Aspergillus Niger, Aspergillus fumigates, Aspergillus terreus, Phaeosphaeria nodorum, Coccidioides immitis, Neosartorya fischeri, Magnaporthe grisea, Ajellomyces capsulate, Botryotinia fuckeliana, Sclerotinia sclerotiorum, Podospora anserine, and Pyrenophora tritici-repentis. In a preferred embodiment the transhydrogenase of Neurospora crassa (GI:164426165) is expressed in yeast to achieve cofactor balance of a mitochondrially produced isobutanol pathway. The gene codes for a NAD(P) transhydrogenase, mitochondrial precursor and consists of two subunits alpha and beta coded by the regions PNTA and PNTB.

[0234] A preferred transhydrogenase under conditions in which the reduced cofactor NADPH is limiting is one that preferentially catalyzes the conversion of NADH to NADPH. For example, membrane-bound transhydrogenases have been described in eukaryotes as for example in mammalian cells (Rydstrom J., Trends in Biochemical Sciences, 2006, 31(7): 355-358) as well as in bacteria such as E. coli (Sauer U., et al., The Journal of Biological Chemistry 2004, 279: 6613-6619). Membrane bound transhydrogenases require energy in form of proton translocation to catalyze the reaction. As long as there is enough energy available to maintain the proton gradient across the cell membrane or across the inner mitochondrial membrane a transhydrogenase may thus be used to balance an otherwise imbalanced metabolic pathway. Thus, expression of these transhydrogenases in the mitochondria of yeast can resolve the cofactor imbalance in the mitochondria.

Microorganism Characterized by Providing Partial Cofactor Balance Via ADH that is Able to Utilize NADH.

[0235] As detailed above, production of isobutanol from glucose using the aforementioned pathway in the mitochondria results in cofactor imbalance as 2 NADHs are generated in the cytosol via glycolysis and 2 NADPHs are consumed in the mitochondria by the isobutanol pathway. Yeast cells are able to transfer the reducing equivalents from the cytosol to the mitochondria via an NADH shuttle. This results in an NADH in the mitochondria, which would still result in a cofactor imbalance with the isobutanol pathway. This imbalance can be partially resolved by the use of a mitochondrial isobutanol pathway that consumes 1 NADH and 1 NADPH instead of 2 NADPH. For the mitochondrial isobutanol pathway to consume NADH, the NADPH dependent enzyme, ADH can be replaced by either an NADH dependent homolog or an enzyme that has been engineered to use NADH.

[0236] There are two NADPH dependent alcohol dehydrogenases, Adh6p and Adh7p in S. cerevisiae, that are able to convert isobutyraldehyde to isobutanol. However, these enzymes are likely expressed in the cytosol of yeast and should not affect the cofactor balance in the mitochondria much as long as the conversion of isobutyraldehyde to isobutanol takes place in that compartment. If the reduction of isobutyraldehyde is catalyzed by a cytosolic NADH dependent ADH the endogenous NADPH dependent enzymes might interfere with the cofactor balance depending on the expression levels of these endogenous enzymes. In case of interference the endogenous ADH activities can be reduced or eliminated for example by disruption of the native coding genes.

[0237] In one embodiment of the invention, a microorganism is provided in which the cofactor-dependent final step for the conversion of isobutyraldehyde to isobutanol is catalyzed by an NADH dependent alcohol dehydrogenase. In a specific aspect, such an alcohol dehydrogenase may be encoded by the Drosophila melanogaster alcohol dehydrogenase (Accession: NT_{—}033779, Region: 14615555..14618902) or homologs thereof. In another specific aspect such an alcohol dehydrogenase may be Lactococcus lactis AdhA (SEQ ID NO: 68).

[0238] In one embodiment of this invention only one of the redox cofactor dependent conversions of the isobutanol pathway is catalyzed by an enzyme that is NADH dependent while the other enzyme is NADPH dependent. In a specific aspect the enzyme that is NADH dependent is the ADH converting isobutyraldehyde to isobutanol and the NADPH dependent enzyme is KARI converting acetolactate into dihydroxyisovalerate. This partial cofactor balance improves the yield of isobutanol production of a recombinant microorganism expressing an isobutanol pathway.

[0239] A partial cofactor balance as that achieved by use of a NADH dependent ADH in the isobutanol pathway can be combined with the use of the malate pathway and it can be combined with the expression of a transhydrogenase. These combined approaches can lead to complete cofactor balance of the production microorganism.

### Microorganism Characterized by Increased Capacity to Produce Intermediates of the Isobutanol Pathway

[0240] As a consequence of increased yield of isobutanol, it follows that this yeast microorganism exhibits a higher capacity to produce the intermediates of the isobutanol pathway including, but not limited to, acetolactate, 2,3-dihydroxyisovalerate, keto-isovalerate, and isobutyraldehyde.

### Method of Using Microorganism for High-Yield Isobutanol Fermentation

[0241] In a method to produce isobutanol from a carbon source at high yield, the yeast microorganism is cultured in an appropriate culture medium containing a carbon source.

[0242] Another exemplary embodiment provides a method for producing isobutanol comprising a recombinant yeast microorganism of the invention in a suitable culture medium containing a carbon source that can be converted to isobutanol by the yeast microorganism of the invention.

[0243] In certain embodiments, the method further includes isolating isobutanol from the culture medium. For example, isobutanol may be isolated from the culture medium by any method known to those skilled in the art, such as distillation, pervaporation, or liquid-liquid extraction. The GIFT® separation process is discussed and described in the commonly owned and co-pending U.S. patent application Ser. No. 12/342,992 (US Publication No. 20090171129), hereby incorporated by reference in its entirety.

### EXAMPLES

[0244] The following examples illustrate how yeast microorganisms are modified to produce isobutanol pathway enzymes in their mitochondria, allowing for the production of isobutanol under conditions that include anaerobic conditions.

### Sample Preparation

[0245] All samples (2 mL) from fermentation experiments performed in shake flasks are centrifuged at 14,000×g for 10 min and the supernatant is stored at 4° C. for later analysis. Analysis of substrates and products is performed using authentic standards (>99%, obtained from Sigma-Aldrich), and a 5-point calibration curve (with 1-pentanol as an internal standard for analysis by gas chromatography).

Determination of Optical Density and Cell Dry Weight The optical density of the yeast cultures is determined at 600 nm using a DU 800 spectrophotometer (Beckman-Coulter, Fullerton, Calif., USA). Samples are diluted as necessary to yield an optical density of between 0.1 and 0.8. The cell dry weight is determined by centrifuging 50 mL of culture prior to decanting the supernatant. The cell pellet is washed once with 50 mL of milliQ H₂O, centrifuged and the pellet is washed again with 25 mL of milliQ H₂O. The cell pellet is then dried at 80° C. for at least 72 hours. The cell dry weight is calculated by subtracting the weight of the centrifuge tube from the weight of the centrifuge tube containing the dried cell pellet.

### Gas Chromatography

[0246] Analysis of volatile organic compounds, including ethanol and isobutanol is performed on a HP 5890 gas chromatograph fitted with an HP 7673 Autosampler, a DB-FFAP column (J&W; 30 m length, 0.32 mm ID, 0.25 μM film thickness) or equivalent connected to a flame ionization detector (FID). The temperature program is as follows: 200° C. for the injector, 300° C. for the detector, 100° C. oven for 1 minute, 70° C./minute gradient to 235° C., and then hold for 2.5 min.

[0247] Analysis is performed using authentic standards (>99%, obtained from Sigma-Aldrich), and a 5-point calibration curve with 1-pentanol as the internal standard.

### High Performance Liquid Chromatography

[0248] Analysis of glucose and organic acids is performed on a HP-1100 High Performance Liquid Chromatography system equipped with an Aminex HPX-87H Ion Exclusion column (Bio-Rad, 300×7.8 mm) or equivalent and an H⁺ cation guard column (Bio-Rad) or equivalent. Organic acids are detected using an HP-1100 UV detector (210 nm, 8 nm 360 nm reference) while glucose is detected using an HP-1100 refractive index detector. The column temperature is 60° C. This method is Isocratic with 0.008 N sulfuric acid in water as mobile phase. Flow is set at 0.6 mL/min. Injection size is 20 μL and the run time is 30 minutes.

### Molecular Biology and Bacterial Cell Culture

[0249] Standard molecular biology methods for cloning and plasmid construction are generally used, unless otherwise noted (Sambrook, J., Russel, D. W. Molecular Cloning, A Laboratory Manual. 3 ed. 2001, Cold Spring Harbor, N.Y.: Cold Spring Harbor Laboratory Press).

[0250] Standard recombinant DNA and molecular biology techniques used in the Examples are well known in the art and are described by Sambrook, J., Russel, D. W. Molecular Cloning, A Laboratory Manual. 3 ed. 2001, Cold Spring Harbor, N.Y.: Cold Spring Harbor Laboratory Press; and by T. J. Silhavy, M. L. Bennan, and L. W. Enquist, Experiments with Gene Fusions, Cold Spring Harbor Laboratory Press, Cold Spring Harbor, N.Y. (1984) and by Ausubel, F. M. et al., Current Protocols in Molecular Biology, pub. by Greene Publishing Assoc. and Wiley-Interscience (1987).

[0251] General materials and methods suitable for the routine maintenance and growth of bacterial cultures are well known in the art. Techniques suitable for use in the following examples may be found as set out in Manual of Methods for General Bacteriology (Phillipp Gerhardt, R. G. E. Murray, Ralph N. Costilow, Eugene W. Nester, Willis A. Wood, Noel R. Krieg and G. Briggs Phillips, eds.), American Society for Microbiology, Washington, D.C. (1994)) or by Thomas D. Brock in Biotechnology: A Textbook of Industrial Microbiology, Second Edition, Sinauer Associates, Inc., Sunderland, Mass. (1989).

### Aerobic Batch Fermentations

[0252] 3 mL overnight cultures in YPD are inoculated from colonies or patches of the strains to be tested. These overnight cultures are incubated in 14 mL culture tubes for 18 h at 30° C., in an orbital shaker at 250 rpm. These overnight cultures are then used to inoculate 100 mL YPD cultures in 1 L shake flasks. In the case of a PDC-deficient (Pdc-minus) C2-dependent S. cerevisiae strain, the overnight culture and the 100 mL culture are grown in YPEthanol (20 g-ethanol L⁻¹). The cultures are harvested at an OD600 of 0.6-1 in mid- to late-log phase. The cells are resuspended in 50 mL YPD medium containing 50 g/L glucose and the cultures are incubated in 250 mL shake flasks at 30° C., 250 rpm. Samples (2 mL) are taken at 24 and 48 hours and cells removed by centrifugation at ≧14000×g for 10 min in a microcentrifuge. The supernatants are kept at 4° C. until analysis by Gas Chromatography and/or High Performance Liquid Chromatography.

### Anaerobic Batch Fermentations

[0253] Anaerobic batch cultivations are performed at 30° C. in stoppered 100 mL serum bottles that are inoculated and sampled in an anaerobic chamber to maintain anaerobic conditions throughout the experiment. A 20 mL aliquot of medium with an initial glucose concentration of 20 g-glucose L⁻¹ is used (Kaiser et al., Methods in Yeast Genetics, a Cold Spring Harbor Laboratory Manual (1994)). Samples (2 mL) are taken at 24 and 48 hours. The fermentation is ended after 48 hours or when all glucose is consumed. Samples are processed and analyzed by Gas Chromatography and/or High Performance Liquid Chromatography as described above.

Yeast Transformations—S. cerevisiae

[0254] S. cerevisiae strains were transformed by the Lithium Acetate method (Gietz et al., Nucleic Acids Res. 27:69-74 (1992)). Cells from 50 mL YPD cultures were collected by centrifugation (2700 rcf, 2 minutes, 25° C.) once the cultures reached an OD₆₀₀ of 1.0. The cells were washed cells with 50 mL sterile water and collecte^{d} by centrifugation at 2700 rcf for 2 minutes at 25° C. The cells were washed again with 25 mL sterile water and cells were collected by centrifugation at 2700 rcf for 2 minutes at 25° C. The cells were resuspended in 1 mL of 100 mM lithium acetate and transferred to a 1.5 mL Eppendorf tube. The cells were collected by centrifugation for 20 sec at 18,000 rcf, 25° C. The cells were resuspended in a volume of 100 mM lithium acetate that was approximately 4× the volume of the cell pellet. A mixture of DNA (final volume of 15 μl with sterile water), 72 μl 50% PEG, 10 μl 1 M lithium acetate, and 3 μl denatured salmon sperm DNA was prepared for each transformation. In a 1.5 mL tube, 15 μl of the cell suspension was added to the DNA mixture (85 n1), and the transformation suspension was vortexed with 5 short pulses. The transformation was incubated at 30 minutes at 30° C., followed by incubation for 22 minutes at 42° C. The cells were collected by centrifugation for 20 sec at 18,000 rcf, 25° C. The cells were resuspended in 100 μl SOS (1 M sorbitol, 34% (v/v) YEP (1% yeast extract, 2% peptone), 6.5 mM CaCl₂) and spread over a SC+glucose-uracil plate.

### Yeast Colony PCR

[0255] Yeast colony PCR is performed using the Epicentre Failsafe PCR kit (using Buffer E). Reactions are set up according to manufacturer's protocol and a small amount of yeast cells are resuspended in the reaction. PCR reactions are run according to standard protocols.

Preparation of E. coli Electrocompetent Cells and Transformation

[0256] The acceptor strain culture is grown in SOB-medium (Sambrook, J., Russel, D. W. Molecular Cloning, A Laboratory Manual. 3 ed. 2001, Cold Spring Harbor, N.Y.: Cold Spring Harbor Laboratory Press) to an OD₆₀₀ of about 0.6 to 0.8. The culture is concentrated 100-fold, washed once with ice cold water and 3 times with ice cold 10% glycerol. The cells are then resuspended in 150 μL of ice-cold 10% glycerol and aliquoted into 50 μL portions. These aliquots are used immediately for standard transformation or stored at −80° C. These cells are transformed with the desired plasmid(s) via electroporation. After electroporation, SOC medium (Sambrook, J., Russel, D. W. Molecular Cloning, A Laboratory Manual. 3 ed. 2001, Cold Spring Harbor, N.Y.: Cold Spring Harbor Laboratory Press) is immediately added to the cells. After incubation for an hour at 37° C. the cells are plated onto LB-plates containing the appropriate antibiotics and incubated overnight at 37° C.

Transformation of Kluyveromyces marxianus

[0257] For the integration of the isobutanol pathway into the chromosome of the yeast strains a modular cassette approach is taken. Two plasmids are constructed wherein plasmid 1 contains from 5′ to 3′: P_{PDC1} promoter, pathway genes with their promoters and terminators, 5′ end of URA3 with its promoter. Plasmid 2 contains from 5′ to 3′:3′ end of URA3 with its terminator, pathway genes with their promoters and terminators, PDC1 terminator. The URA3 sequences overlap to provide homology between the two plasmids. These features of the plasmids can be cut out of the vectors using restriction enzymes or amplified by PCR to get linear DNA pieces. These pieces are then transformed into the host organism. Homologous recombination leads to integration of both DNA pieces into the PDC1 locus on the chromosome deleting PDC1. At the same time the URA3 pieces in each linear DNA fragment recombine to give a functional URA3 marker that is used for selection.

[0258] K. marxianus is grown in YPD medium at 30° C. and 250 rpm to an OD600 of 1.0-4.0. The cells are pelleted and washed with 10 mL of EB (10 mM Tris-Cl, 270 mM sucrose, 1 mM MgCl2, pH 7.5). The cells are again pelleted, and then resuspended in 10 mL IB (YPD+ fresh 25 mM DTT, 20 mM HEPES, pH 8.0) and incubated at 30° C. and 250 rpm for 30 minutes. The cells are then pelleted and washed with 10 mL EB, and the cells are kept on ice from this point on. The cells are pelleted and resuspended in 1 mL EB and transferred to a microfuge tube. The cells are pelleted in a microfuge, and then resuspended in the appropriate amount of EB to make the final cell concentration 30-380D/mL. 400 μL of the cell suspension is added to a chilled cuvette (4 mm gap), and 50 μL of linearized DNA (1-2 μg) is added and mixed by pipetting. The cells are incubated in the cuvette with DNA on ice for 15 to 30 minutes, and then electroporated at 1.8 kV, 1000Ω, and 25 μF. The cells are washed out of the cuvette with 1 mL YPD, and transferred to a fresh 50 mL tube and incubated at 30° C. and 250 rpm for 4 hours. After recovery, the transformation is plated on 7 selection plates (200 μL per plate) and incubated at 30° C.

### Construction of Strains and Plasmids

[0259] The Kluyveromyces marxianus strain GEVO1068 (NRRL-Y-7571) was obtained from the USDA collection.

[0260] GEVO1947 is a ura3Δ version of GEVO1068 and was generated by selection on 5-fluorouracil-6-carboxylic acid monohydrate (FOA). The K. marxianus URA3 gene was deleted by transformation of GEVO1068 with a PCR fragment of Km_URA3 carrying a deletion of 348 bp that was amplified from pGV1799 using primers 394 and 395. The Km_ura3Δ transformants were selected by plating on 5-FOA plates. The 5-FOA resistant colonies were screened for correct phenotype (auxotrophic for uracil) and for the correct genotype by colony PCR using primers 562 and 837. The wild-type Km_URA3 gene would result in a PCR product of 871 bp using this primer pairs while the presence of the deletion allele would result in a product of 527 bp. This analysis identified FOA^{R} transformants with the expected 350 bp PCR product for a strain containing the deletion allele). In addition, several transformants generated a slightly larger band using the same primer pair. This PCR result is consistent with the hypothesis that these transformants contain a smaller deletion (˜200 bp) in the KmURA3. A transformant with the putative smaller deletion was named GEVO1947 (Km_ura3Δ2).

[0261] The K. marxianus strain GEVO1969 was generated by deletion of PDC1 in GEVO1947. The K. marxianus PDC1 gene was replaced with a G418R marker (aminoglycoside-3′-phosphotransferase (aph) from Tn5 under the TEF1 promoter) by transformation of GEVO1947 with a disruption cassette which contained from 5′ to 3′, the Km_PDC1 promoter, the G418R marker, and the Km_PDC1 terminator sequences. The Km_PDC1 promoter was amplified from K. marxianus genomic DNA using primers 1671 and 1672. The G418R marker was amplified from pGV1503 using primers 1673 and 1674. The Km_PDC1 terminator was amplified from K. marxianus genomic DNA using primers 1675 and 1676. Primers 1673 and 1674 have 5′ extensions that are complementary to primers 1672 and 1675, respectively. These three fragments were combined via two rounds of SOE PCR to generate the disruption cassette. In the first round of SOE PCR, the Km_PDC1 promoter and the G418R marker were combined using primers 1671 and 1674, and the G418R marker and the Km_PDC1 terminator were combined using primers 1673 and 1676. In the second round of SOE PCR, the Km_PDC1 promoter-G418 marker fragment was combined with the Km_PDC1 terminator using primers 1671 and 1676, and the Km_PDC1 promoter was combined with the G418R marker-Km_PDC1 terminator fragment using primers 1671 and 1676. These two PCR products were pooled together, purified and transformed into GEVO1947. Transformants were selected on YPD+G418 plates. Transformants were confirmed for successful deletion of Km_PDC1 by their inability to grow anaerobically, colony PCR, and a lack of ethanol production. One such clone was named GEVO1969.

[0262] The PDC-deficient (Pdc-) S. cerevisiae strain GEVO1581 was obtained from Prof. Paul van Heusden at the University of Leiden in the Netherlands. Strain GEVO1584 was generated by crossing GEVO1187 and GEVO1537 and selecting for diploids from mating between the two strains by selecting for growth on minimal glucose media lacking uracil. The resulting diploids were sporulated and progeny with the appropriate genotype was isolated. Strain GEVO7777 is generated by crossing GEVO1187 and GEVO1537 and selecting for diploids from mating between the two strains by selecting for growth on minimal glucose media lacking uracil. The resulting diploids are sporulated and progeny with the appropriate genotype is isolated.

[0263] The C2-independent strain, GEVO1863, was generated from the PDC-deficient (Pdc-) S. cerevisiae GEVO1584 by evolution. This evolution was performed essentially as previously described (van Maris, A., et al., Applied and Environmental Microbiology, 2004, 70(1):159-166). Briefly, GEVO1584 was grown in a chemostat using minimal media with ethanol as a carbon source. The media was switched to minimal media with 7.125 g/L glucose and 0.375 g/L acetate. Once the culture was stabilized, the acetate level was decreased to 0 g/L over a period of 3 weeks. Over the same time period the glucose concentration in the feed was increased so that the carbon concentration in the feed was constant throughout the experiment. A single colony was isolated from the chemostat and was further evolved through 24 serial dilutions in YPD in test tubes. GEVO1863 is an isolate from this evolved culture. This strain does not require ethanol or acetate for growth.

[0264] GEVO1803 was made by transforming GEVO1186 with the 6.7 kb pGV1730 (contains S. cerevisiae TRP1 marker and the CUP1 promoter-driven B. subtilis BsalsS2 (SEQ ID NO: 151) that had been linearized by digestion with NruI. Completion of the digest was confirmed by running a small sample on a gel. The digested DNA was then purified using Zymo Research DNA Clean and Concentrator and used in the transformation. Trp+ clones were confirmed for the correct integration into the PDC1 locus by colony PCR using primer pairs 1440+1441 and 1442+1443 for the 5′ and 3′ junctions, respectively. Transcription of BsalsS2 was confirmed by qRT-PCR using primer pairs 1323+1324 (qRT-PCR).

[0265] GEVO2107 was made by transforming GEVO1803 with linearized, HpaI-digested pGV1914. Correct integration of pGV1914 at the PDC6 locus was confirmed by analyzing candidate Ura+ colonies by colony PCR using primers 1440 plus 1441, or 1443 plus 1633, to detect the 5′ and 3′ junctions of the integrated construct, respectively. Expression of all transgenes was confirmed by qRT-PCR using primer pairs 1321 plus 1322, 1587 plus 1588, and 1633 plus 1634 to examine BsalsS2, LlkivD2, and DmADH transcript levels, respectively.

[0266] GEVO2158 was made by transforming GEVO2107 with NruI-digested pGV1936. Correct integration of pGV1936 at the PDC5 locus was confirmed by analyzing candidate Ura+, Leu+ colonies by colony PCR using primers primers 1436 plus 1437, or 1595 plus 1439, to detect the 5′ and 3′ junctions of the integrated construct, respectively. Expression of all transgenes were confirmed by qRT-PCR using primer pairs 1321 plus 1322, 1597 plus 1598, 1566 plus 1567, 1587 plus 1588, 1633 plus 1634, and 1341 plus 1342 to examine mRNA levels of BsalsS2 (SEQ ID NO: 151), EcilvCco(Sc)^{Q110V} (SEQ ID NO: 159), Scilv3ΔN (SEQ ID NO: 160), LlkivD2 (SEQ ID NO:155), (SEQ ID NO: 161), and ACT1, respectively.

[0267] GEVO2302 was made by sporulating GEVO2158. Haploid spores were prepared for random spores analysis (as described above), and the spores were plated onto SCE-Trp, Leu, Ura medium. Candidate colonies were patched onto SCE-Trp, Leu, Ura plates and then replica plated onto YPD and YPE plates. Patches that grew on YPE but failed to grow on YPD were further analyzed by colony PCR to confirm mating type (and, hence, their status as haploid). Several verified haploid candidates were further analyzed for transgenic expression by qRT-PCR. GEVO2302 contains the full isobutanol pathway, and specifically contains a transgenic expressing EcilvCco(Sc)^{Q110V}.

[0268] GEVO2542 was made by transforming GEVO1969 with pGV2061 digested with EcoRI and BglII and pGV2062 digested with NheI and HindIII. The integration was confirmed by qRT-PCR which confirmed transcription of Bs_alsS, Ll_kivd and Dm_ADH. From this strain the ura3 marker was removed by selection on 5-FOA containing plates. Colonies from the plate were streaked on YPE and SCD-ura plates to confirm the loss of the ura3 marker. One confirmed clone was named GEVO2542.

[0269] The K. marxianus strains GEVO2346, GEVO2347, and GEVO2348 were constructed by transformation of GEVO1969 with pGV1990 and pGV2015 that had been linearized with the restriction enzyme PvuI and purified by ethanol precipitation. The transformation was plated on SCE-URA plates to select for integrants. Integrants were verified by colony PCR.

[0270] The K. marxianus strains GEVO2276 and GEVO2277 were constructed by transformation of KARL1969 with pGV1875 that had been linearized with the restriction enzyme PvuI and purified by ethanol precipitation. The transformation was plated on SCE-URA plates to select for integrants. Integrants were verified by colony PCR.

[0271] The K. marxianus strains GEVO2087 and GEVO2088 were constructed by transformation of KARL1947 with pGV1875 that had been linearized with the restriction enzyme PvuI. The transformation was plated on SC-URA plates to select for integrants. Integrants were verified by colony PCR.

[0272] The Saccharomyces cerevisiae strain GEVO2072 was constructed by transformation of GEVO1186 with pGV1875 that had been linearized with the restriction enzyme PvuI. The transformation was plated on SC-URA plates to select for integrants. Integrants were verified by colony PCR.

[0273] The Saccharomyces cerevisiae strain GEVO2119 was constructed by transformation of GEVO1186 with pGV1874 that had been linearized with the restriction enzyme PvuI. The transformation was plated on SC-URA plates to select for integrants. Integrants were verified by colony PCR.

[0274] The Saccharomyces cerevisiae strains GEVO2120 and GEVO2121 were constructed by transformation of GEVO1186 with pGV1877 that had been linearized with the restriction enzyme PvuI. The transformation was plated on SC-URA plates to select for integrants. Integrants were verified by colony PCR.

[0275] The Saccharomyces cerevisiae strains GEVO2122 and GEVO2123 were constructed by transformation of GEVO1186 with pGV1878 that had been linearized with the restriction enzyme PvuI. The transformation was plated on SC-URA plates to select for integrants. Integrants were verified by colony PCR.

[0276] The Saccharomyces cerevisiae strains GEVO2124 and GEVO2125 were constructed by transformation of GEVO1186 with pGV1879 that had been linearized with the restriction enzyme PvuI. The transformation was plated on SC-URA plates to select for integrants. Integrants were verified by colony PCR.

[0277] The Saccharomyces cerevisiae strain GEVO2126 was constructed by transformation of GEVO1186 with pGV1892 that had been linearized with the restriction enzyme PvuI. The transformation was plated on SC-URA plates to select for integrants. Integrants were verified by colony PCR.

[0278] Strain AP is constructed by transforming GEVO1947 with linear DNA from pGV1817 and additional linear DNA from pGV7001 resulting in strain AP. This combination of linear DNA contains genes coding for all five isobutanol pathway enzymes, and the uracil marker for selection. The transformation leads to random (non-targeted) insertion of the isobutanol pathway into the K. marxianus genome. Adh7p is targeted to its native compartment, the cytosol. All other pathway enzymes are targeted to the mitochondrium. Pathway enzymes that are not natively localized to the mitochondrium are fused to mitochondrial targeting sequences that direct them to the mitochondrium. The transformed cells are plated onto selective medium without uracil and incubated at 30° C. for 3 days. After 3 days colonies are patched onto selective plates and these patches are used for colony PCR and RT PCR to verify correct integration and transcription of the pathway genes.

[0279] To construct strain SCP1, GEVO1186, a diploid CEN.PK strain, is first transformed with linear DNA from pGV1817 and additional linear DNA from pGV7001 resulting in strain SCP1. The combination of linear DNA contains genes coding for all five isobutanol pathway enzymes, the S. cerevisiae PDC1 promoter (P_{ScPDC1}) and terminator (T_{ScPDC1}) sequences for homologous integration into the PDC1 locus and the uracil marker for selection. This homologous replacement event results in the simultaneous integration of the isobutanol pathway along with the deletion of the PDC1 coding sequence. Adh7p is targeted to its native compartment, the cytosol. All other pathway enzymes are targeted to the mitochondrium. Pathway enzymes that are not natively localized to the mitochondrium are fused to mitochondrial targeting sequences that direct them to the mitochondrium. The transformed cells are plated onto selective medium using ethanol as carbon source and lacking uracil and incubated at 30° C. for 3-4 days. After 3-4 days colonies are patched onto selective plates and these patches are used for colony PCR and RT PCR to verify correct integration and transcription of the pathway genes.

[0280] To construct strain SC1, GEVO7777, a haploid CEN.PK strain deleted for PDC5 and PDC6, is first transformed with linear DNA from pGV1817 and additional linear DNA from pGV7001 resulting in strain SC1. The combination of linear DNA contains genes coding for all five isobutanol pathway enzymes, the S. cerevisiae PDC1 promoter and terminator sequences for homologous integration into the PDC1 locus and the uracil marker for selection. This homologous replacement event results in the simultaneous integration of the isobutanol pathway along with the deletion of the PDC1 coding sequence. Adh7p is targeted to its native compartment, the cytosol. All other pathway enzymes are targeted to the mitochondrium. Pathway enzymes that are not natively localized to the mitochondrium are fused to mitochondrial targeting sequences that direct them to the mitochondrium. The transformed cells are plated onto selective medium using ethanol as carbon source and lacking uracil and incubated at 30° C. for 3-4 days. After 3-4 days colonies are patched onto selective plates and these patches are used for colony PCR and RT PCR to verify correct integration and transcription of the pathway genes.

[0281] The plasmid pGV1773 (SEQ ID NO: 1) was a clone obtained from DNA2.0 in which the sequence containing the ScPDC1 promoter (P_{ScPDC1}), BsalsS, ScTDH3 promoter (P_{ScTDH3}), LlkivD, ScADH1 promoter (P_{ScADH1}), ScADH7, ScFBA1 promoter (P_{ScFBA1}), and 5′ fragment of ScURA3 was synthesized. BsalsS, LlkivD and ScADH7 have been codon optimized for S. cerevisiae.

[0282] The plasmid pGV1774 (SEQ ID NO: 2) was a clone obtained from DNA2.0 in which the sequence containing the 3′ fragment of ScURA3 coding sequence and terminator, ScFBA1 promoter (P_{ScFBA1}), EcilvC codon optimized for S. cerevisiae (EcilvCco), ScTPI1 promoter (P_{ScTPI1}), EcilvD codon optimized for S. cerevisiae (EcilvDco), ScPDC1 terminator (T_{ScPDC1}) was synthesized.

[0283] The plasmid pGV1810 (SEQ ID NO: 3) was constructed to replace the EcilvCco gene in pGV1774 with Saccharomyces cerevisiae ILV5. It was constructed by PCR amplification of ILV5 from S. cerevisiae genomic DNA with primers 1615 and 1616, which add XhoI and BamHI sites flanking the full-length ILV5 sequence. The ScILV5 PCR product was digested with XhoI and BamHI. The vector pGV1774 was digested with XhoI and BglII. The digested ScILV5 PCR product and pGV1774 were ligated to yield pGV1810.

[0284] The plasmid pGV1811 (SEQ ID NO: 4) was constructed to replace the existing S. cerevisiae P_{ScPDC1} promoter region in pGV1773 with a Kluyveromyces marxianus P_{KmPDC1} promoter region. It was constructed by PCR amplification of a region of the K marxianus P_{PDC1} promoter from genomic DNA with primers 1658 and 1608, and of a region of pGV1773 with primers 1652 and 1653. The above PCR products were combined in a splicing by overlap extension (SOE) PCR reaction to splice the fragments as described by Horton, R M; Hunt, H D; Ho, S N; Pullen, J K; Pease, L R. Engineering hybrid genes without the use of restriction enzymes: gene splicing by overlap extension. Gene 77, 61-68 (1989). The SOE PCR reaction was required to introduce a BglII site to the 5′ end of the P_{PDC1} promoter. The resulting SOE PCR product and the vector, pGV1773, were digested with PvuI and SalI and ligated to yield pGV1811.

[0285] The plasmid pGV1812 (SEQ ID NO: 5) was constructed to replace the existing S. cerevisiae T_{ScPDC1} terminator region in pGV1774 with a K. marxianus T_{KmPDC1} terminator region. It was constructed by PCR amplification of a region of T_{KmPDC1} from genomic DNA with primers 1609 and 1610. The resulting PCR product and the vector, pGV1774, were digested with BamHI and HindIII and ligated to yield pGV1812.

[0286] The plasmid pGV1817 (SEQ ID NO: 6) was constructed to replace the EcilvDco gene in pGV1810 with S. cerevisiae ILV3. It was constructed by PCR amplification of ScILV3 from S. cerevisiae genomic DNA using primers 1617 and 1618. The PCR product and pGV1810 were digested with SalI and BamHI, and were ligated to yield pGV1817.

[0287] The plasmid pGV1832 (SEQ ID NO: 7) was constructed to replace the existing S. cerevisiae T_{ScPDC1} terminator region in pGV1817 with a K. marxianus T_{KmPDC1} terminator region. It was constructed by digestion of pGV1812 and pGV1817 with PvuI and BamHI. The T_{KmPDC1} from pGV1812 was ligated into the pGV1817 backbone to yield pGV1832.

[0288] The plasmid pGV1834 (SEQ ID NO: 8) was constructed to replace the existing Bacillus subtilis BsalsS gene and the Lactococcus lactis LlkivD gene in pGV1811 with the same genes, but with additional sequence encoding the 25 amino acid mitochondrial targeting sequence from the S. cerevisiae cytochrome oxidase subunit 4 gene (COX4) at the 5′ end of BsalsS and additional sequence encoding the mitochondrial targeting sequence from S. cerevisiae Hmi1p, a mitochondrial DNA helicase at the 3′ end of LlkivD. It was constructed by PCR amplification of BsalsS, S. cerevisiae P_{ScTDH3} promoter, and L. lactis LlkivD from pGV1773 with primers 1681 and 1661. Primer 1681 added nucleotides that encode part of the mitochondrial targeting sequence of COX4 from S. cerevisiae to the 5′ end of BsalsS, and primer 1661 added 55 nucleotides encoding part of the mitochondrial targeting sequence of ScHMI1p, to the 3′ end of the LlkivD gene. The above PCR product was then used in an SOE PCR reaction to splice each mitochondrial targeting sequence to the appropriate end of the PCR product. The DNA of mitochondrial targeting sequences was obtained from oligonucleotides of both strands of each mitochondrial targeting sequence. For each mitochondrial targeting sequence, both oligonucleotides were annealed to each other by reconstituting each oligonucleotide to a final concentration of 20 μM in TE (Tris 10 mM, EDTA 1 mM, 50 mM NaCl). 50 μL of each oligonucleotide was mixed with 50 μL of the corresponding oligonucleotide and incubated at 95° C. for 5 minutes in a heating block, and then cooled slowly to room temperature by turning the heating block off. The oligonucleotide numbers for the Cox4p mitochondrial targeting sequence are 1665 and 1666, and for the Hmi1p MTS are 1663 and 1664. The annealed oligonucleotides of the mitochondrial targeting sequences were combined with the PCR product in the SOE PCR reaction in which primers 1683 and 1684 were used. The resulting SOE PCR product was then digested with NheI and XhoI, and the vector, pGV1811, was digested with SalI and AvrII, and the two were ligated to yield pGV1834. The same SOE PCR product is also ligated into pGV1773 using the same restriction endonucleases to yield pGV7001 (SEQ ID NO: 9).

[0289] The plasmids pGV7101 (SEQ ID NO: 10) and pGV9834 (SEQ ID NO: 11), are constructed by ligating a SOE-PCR product containing nucleotides coding for the MTS of Adh3p from S. cerevisiae fused to the 5′ end of the ScADH7 gene into the plasmids pGV1834 and pGV7001 respectively, wherein the SOE-PCR product and the plasmids are digested with NdeI and NcoI. The SOE-PCR product is prepared by amplifying the 5′ end of the ScADH7 gene excluding the start codon using the primers ADH7F and ADH7R. ADH7F includes 20 nucleotides of homology to the 5′ sequence of ADH3. Two oligonucleotides (ADH3MTSF, ADH3MTSR) containing the sense and the antisense strands of the coding sequence for the first 29 amino acids of Adh3p, a NdeI site, and 5 nucleotides that are homologous to the 5′ end of ADH7 are synthesized and annealed. The PCR product and the annealed oligonucleotides are combined in a SOE reaction using the primers ADH37F and ADH7R.

[0290] A NADH dependent KARI containing a mitochondrial targeting sequence (EcilvCco(Sc)^{P2D1-A1-HIS6}(SEQ ID NO: 162) which is described in co-pending U.S. application Ser. No. 12/610,784) is cloned into pGV1817 replacing ScILV5 to generate pGV1817N (SEQ ID NO: 12).

[0291] The gene DmADH gene (GI:78706922) coding for the NADH dependent Drosophila melanogaster ADH is cloned into pGV1834 replacing ADH7 to generate pGV1834N (SEQ ID NO: 14). DmADH is amplified in a PCR reaction, using primers DmADHF and 1364 and the clone RH54514 (Drosophila Genome Resource Center) as a template. The ˜0.8 kb PCR product so generated is digested with NdeI and NotI and ligated with pGV1834 which is digested with NdeI and NotI to yield pGV1834N.

[0292] The gene DmADH gene (GI:78706922) coding for the NADH dependent Drosophila melanogaster ADH is fused to the sequence coding for the Adh3p-MTS using SOE-PCR. The SOE-PCR product is prepared by amplifying the 5′ end of the DmADH7 gene excluding the start codon using the primers DmADH3F and DmADH3R. DmADH3F includes 20 nucleotides of homology to the 5′ sequence of ADH3. Two oligonucleotides (DmADH3MTSF, DmADH3MTSR) containing the sense and the antisense strands of the coding sequence for the first 29 amino acids of Adh3p, a NdeI site, and 5 nucleotides that are homologous to the 5′ end of DmADH are synthesized and annealed. The PCR product and the annealed oligonucleotides are combined in a SOE reaction using the primers ADH37F and DmADH3R. The SOE-PCR product is cloned into pGV1834 replacing ADH7 to generate pGV9834N (SEQ ID NO: 17).

[0293] The gene DmADH gene (GI:78706922) coding for the NADH dependent Drosophila melanogaster ADH is cloned into pGV7001 replacing ADH7 to generate pGV7001N (SEQ ID NO: 15). DmADH is amplified in a PCR reaction, using primers DmADHF and 1364 and the clone RH54514 (Drosophila Genome Resource Center) as a template. The ˜0.8 kb PCR product so generated is digested with NdeI and NotI and ligated with pGV7001 which is digested with NdeI and NotI to yield pGV7001N (SEQ ID NO: 15).

[0294] The gene DmADH gene (GI:78706922) coding for the NADH dependent Drosophila melanogaster ADH is fused to the sequence coding for the Adh3p-MTS using SOE-PCR. The SOE-PCR product is prepared by amplifying the 5′ end of the DmADH7 gene excluding the start codon using the primers DmADH3F and DmADH3R. DmADH3F includes 20 nucleotides of homology to the 5′ sequence of ADH3. Two oligonucleotides (DmADH3MTSF, DmADH3MTSR) containing the sense and the antisense strands of the coding sequence for the first 29 amino acids of Adh3p, a NdeI site, and 5 nucleotides that are homologous to the 5′ end of DmADH are synthesized and annealed. The PCR product and the annealed oligonucleotides are combined in a SOE reaction using the primers ADH37F and DmADH3R. The SOE-PCR product is cloned into pGV7001 replacing ADH7 to generate pGV7101N (SEQ ID NO: 16).

[0295] A NADH dependent KARI containing a mitochondrial targeting sequence is cloned into pGV1832 replacing ILV5 to generate pGV1832N (SEQ ID NO: 13).

[0296] To provide cofactor balance via malate pathway the following genes are overexpressed in the yeast host: PCK1 (GI:83722562), MDH2 (GI:84626310), DIC1 (GI:85666119) and MAE1 (GI:83722562). The genes are amplified by PCR using S. cerevisiae genomic DNA as template and cloned into an integration vector yielding pGV8000 (SEQ ID NO: 18). In this vector the PCK1 gene is controlled by the promoter P_{ScTDH3}, MDH3 is controlled by P_{ScADH1}, DIC1 is controlled by P_{ScFBA1}, and MAE1 is controlled by the promoter P_{ScTP11}. The plasmid also expresses the hygromycin resistance gene, hph under the control of the promoter P_{ScTEF1}. In addition, pGV8000 carries a sequence which consists of, from 5′ to 3′, S. cerevisiae PDC6 terminator, a unique restriction site (HpaI), and the PDC6 promoter to target the integration of the HpaI linearized plasmid to PDC6 in S. cerevisiae.

[0297] The transhydrogenase gene from Neurospora crassa (GI:164426165) (SEQ ID NO: 96) is synthesized according to the sequence from the strain N. crassa 74-OR23-1VA (FGSC#2489). The synthetic gene is flanked by EcoRI and AvrII restriction sites at the 5′ and the 3′ end of the gene respectively. The gene is cloned into the plasmid pGV9000 (SEQ ID NO: 19) in which the expression of the gene is controlled by the strong constitutive promoter TDH3. The plasmid also contains the hygromycin resistance gene, hph under the control of the promoter PScTEF1 and 3′ and 5′ targeting regions that for integration into ScPDC6. The plasmid can be linearized using the restriction site HpaI which is located between the two targeting sequences.

[0298] The plasmid pGV1816 was constructed to replace the 5′ fragment of the URA3 marker in pGV1773 with full length URA3 and a region of the PDC1 terminator downstream in order to integrate genes into the S. cerevisiae genome at the PDC1 locus and to select for integrants. The 3′ region of URA3 was PCR amplified from pGV1774 with primers 1678 and 1679, and the PDC1 terminator was amplified from pGV1774 with primers 1435 and 1680. Primer 1680 added 9 nucleotides of homology to the 3′ fragment of URA3 onto the PDC1 terminator region, and primer 1679 added 13 nucleotides of homology to the PDC1 terminator region onto the 3′ fragment of URA3. The two PCR products were combined in an SOE PCR reaction with primers 1435 and 1680. The resulting SOE PCR product and pGV1773 were digested with EcoRI and SgrAI, and the two were ligated to yield pGV1816.

[0299] The plasmid pGV1874 was constructed to replace the existing Bacillus subtilis BsalsS gene and the Lactococcus lactis LlkivD gene in pGV1816 with the same genes, but adding nucleotides encoding the 25 amino acid mitochondrial targeting sequence from the S. cerevisiae COX4 gene at the 5′ end of BsalsS and adding nucleotides encoding the mitochondrial targeting sequence from S. cerevisiae ScHMI1 at the 3′ end of LlkivD. It was constructed by PCR amplification of B. subtilis BsalsS, S. cerevisiae TDH3 promoter, and L. lactis LlkivD from pGV1773 with primers 1681 and 1661. Primer 1681 added 25 nucleotides encoding part of the first 25 amino acids of the mitochondrial targeting sequence of COX4 from S. cerevisiae to the 5′ end of BsalsS, and primer 1661 added 55 nucleotides encoding part of the mitochondrial targeting sequence of ScHMI1, to the 3′ end of LlkivD. The above PCR product was then used in an SOE PCR reaction with oligonucleotides encoding the mitochondrial targeting sequences to splice each mitochondrial targeting sequence to the appropriate end of the PCR product using primers 1683 and 1684. The oligonucleotide numbers of the mitochondrial targeting sequences are 1665 and 1666 for COX4, and 1663 and 1664 for ScHMI1. The resulting SOE PCR product was digested with NheI and XhoI, and the vector, pGV1816, was digested with SalI and AvrII, and the two were ligated to yield pGV1874.

[0300] The plasmid pGV1877 was constructed to replace the existing B. subtilis BsalsS gene in pGV1816 with BsalsS that has a 31 amino acid mitochondrial targeting sequence at its 5′ end from the S. cerevisiae COX4 gene, and the L. lactis LlkivD gene in pGV1816 with ScARO10 from S. cerevisiae that has a 3′ mitochondrial targeting sequence from the S. cerevisiae ScHMI1 gene. It was constructed by PCR amplification of B. subtilis BsalsS and S. cerevisiae TDH3 promoter from pGV1773 with primers 1682 and 1688, and S. cerevisiae ARO10 from genomic DNA with primers 1689 and 1662. Primer 1682 added 25 nucleotides encoding part of the first 31 amino acids of the targeting sequence of COX4 from S. cerevisiae to the 5′ end of BsalsS, and primer 1688 added 21 nucleotides encoding part of ARO10 to the 3′ end of the TDH3 promoter. Primer 1689 added 18 nucleotides of homology to TDH3 to the 5′ end of ARO10, and primer 1662 added 55 nucleotides encoding part of the ScHMI1 targeting sequence to the 3′ end of ARO10. The two PCR products were combined in an SOE PCR reaction with oligonucleotides encoding the targeting sequences to splice the fragments and targeting sequences using primers 1683 and 1684. The oligonucleotide numbers of the leader sequences are 1667 and 1668 for COX4, and 1663 and 1664 for ScHMI1. The resulting SOE PCR product was digested with NheI and XhoI, and the vector, pGV1816, was digested with SalI and AvrII, and the two were ligated to yield pGV1877.

[0301] The plasmid pGV1878 was constructed to replace the existing B. subtilis BsalsS gene in pGV1816 with ILV2 from S. cerevisiae, and the existing L. lactis LlkivD with Llkivd that has a 3′ mitochondrial targeting sequence from the S. cerevisiae ScHMI1 gene. It was constructed by PCR amplification of S. cerevisiae ILV2 from genomic DNA with primers 1685 and 1686, and amplification of S. cerevisiae TDH3 promoter and L. lactis LlkivD from pGV1773 with primers 1687 and 1661. Primer 1686 added 21 nucleotides encoding part of the 5′ end of the TDH3 promoter to the 3′ end of ILV2. Primer 1687 added 20 nucleotides encoding part of the 3′ end of ILV2 to the 5′ end of the TDH3 promoter, and primer 1661 added 55 nucleotides encoding part of the targeting sequence from ScHMI1 to the 3′ end of LlkivD. The two PCR products were combined in an SOE PCR reaction with the oligonucleotide of the HMI targeting sequence (1663 and 1664) to splice the fragments using primers 1685 and 1684. The resulting SOE PCR product was digested with NheI and XhoI, and the vector, pGV1816, was digested with SalI and AvrII, and the two were ligated to yield pGV1878.

[0302] The plasmid pGV1879 was constructed to replace the existing B. subtilis BsalsS gene in pGV1816 with ILV2 from S. cerevisiae, and the L. lactis LlkivD gene in pGV1816 with ARO10 from S. cerevisiae plus nucleotides encoding the mitochondrial targeting sequence from the S. cerevisiae ScHMI1 at the 3′ end of ScARO10. It was constructed by PCR amplification of S. cerevisiae ILV2 from genomic DNA with primers 1685 and 1686, S. cerevisiae ARO10 from genomic DNA with primers 1689 and 1662, and S. cerevisiae TDH3 promoter from pGV1773 with primers 1690 and 1691. Primer 1686 added 21 nucleotides encoding part of the 5′ end of the TDH3 promoter to the 3′ end of ILV2. Primer 1689 added 18 nucleotides encoding part of the 3′ end of the TDH3 promoter to the 5′ end of ARO10, and primer 1662 added 55 nucleotides encoding part of the ScHMI1 mitochondrial targeting sequence to the 3′ end of ScARO10. The three PCR products were combined in an SOE PCR reaction with the oligonucleotides encoding the ScHMI1 mitochondrial targeting sequence (1663 and 1664) to splice the fragments using primers 1685 and 1684. The resulting SOE PCR product was digested with NheI and XhoI, and the vector, pGV1816, was digested with SalI and AvrII, and the two were ligated to yield pGV1879.

[0303] The plasmid pGV1892 was constructed to replace the existing S. cerevisiae ADH7 gene in pGV1878 with derepressed full length ILV6 (ILV6*) from S. cerevisiae. It was constructed by PCR amplification of the N terminus of ILV6 from S. cerevisiae genomic DNA with primers 1740 and 1741. Primer 1740 added an NdeI site to the 5′ end of ILV6. The rest of ILV6* was PCR amplified from pGV1315 with primer 1738, which has homology to the N terminus of ILV6, and 1739 which included amplification of an existing 3′ NotI site. The resulting PCR products were combined in an SOE PCR reaction with primers 1739 and 1740. The SOE PCR product and pGV1878 were digested with Nod and NdeI, and the two were ligated to yield pGV1892.

[0304] The plasmid pGV1875 (SEQ ID NO: 92) was constructed to replace the existing Bacillus subtilis BsalsS gene and the Lactococcus lactis LlkivD gene in pGV1816 with the same genes, but adding nucleotides encoding the 31 amino acid mitochondrial targeting sequence from the S. cerevisiae COX4 gene at the 5′ end of BsalsS and adding nucleotides encoding the mitochondrial targeting sequence from S. cerevisiae Hmi1p at the 3′ end of LlkivD. It was constructed by PCR amplification of B. subtilis BsalsS, S. cerevisiae TDH3 promoter, and L. lactis LlkivD from pGV1773 with primers 1682 and 1661. Primer 1682 added 25 nucleotides part of the first 31 amino acids of the mitochondrial targeting sequence of COX4 from S. cerevisiae to the 5′ end of BsalsS, and primer 1661 added 55 nucleotides encoding part of the mitochondrial targeting sequence of Hmi1p, to the 3′ end of LlkivD. The above PCR product was then used in an SOE PCR reaction with oligonucleotides encoding the mitochondrial targeting sequences to splice each mitochondrial targeting sequence to the appropriate end of the PCR product using primers 1683 and 1684. The oligonucleotide numbers of the mitochondrial targeting sequences are 1667 and 1668 for COX4, and 1663 and 1664 for ScHMI1. The resulting SOE PCR product was digested with NheI and XhoI, and the vector, pGV1816, was digested with SalI and AvrII, and the two were ligated to yield pGV1875.

[0305] The plasmid pGV1876 (SEQ ID NO: 97) was constructed to replace the existing B. subtilis BsalsS gene in pGV1816 with BsalsS including a 25 amino acid mitochondrial targeting sequence from the S. cerevisiae COX4 gene at the 5′ end of the gene, and the L. lactis LlkivD gene in pGV1816 with ARO10 from S. cerevisiae including a mitochondrial targeting sequence from the S. cerevisiae ScHMI1 gene at the 3′ end of ARO10. It was constructed by PCR amplification of Bacillus subtilis BsalsS and S. cerevisiae TDH3 promoter from pGV1773 with primers 1681 and 1688, and S. cerevisiae ARO10 from genomic DNA with primers 1689 and 1662. Primer 1681 added 25 nucleotides of homology to the first 25 amino acids of the mitochondrial targeting sequence of subunit IV of cytochrome oxidase from S. cerevisiae to the 5′ end of BsalsS, and primer 1688 added 21 nucleotides of homology to ARO10 to the 3′ end of the TDH3 promoter. Primer 1689 added 18 nucleotides of homology to TDH3 to the 5′ end of ARO10, and primer 1662 added 55 nucleotides of homology to the ScHMI1 mitochondrial targeting sequence to the 3′ end of ARO10. The two PCR products were combined in an SOE PCR reaction with oligonucleotides encoding the mitochondrial targeting sequences to splice the fragments using primers 1683 and 1684. The oligonucleotide numbers of the mitochondrial targeting sequences are 1665 and 1666 for cytochrome oxidase, and 1663 and 1664 for ScHMI1. The resulting SOE PCR product was digested with NheI and XhoI, and the vector, pGV1816, was digested with SalI and AvrII, and the two were ligated to yield pGV1876.

Construction of pGV2212

[0306] Sc_BAT1 was cloned into pGV1104, producing pGV2212. Briefly, the sequence for Sc_BAT1 was amplified from S. cerevisiae genomic DNA using primers 2305 and 2323. These primers introduced a NotI and BamHI sites at the 5′ and 3′ ends of the coding sequence, respectively. The PCR product and pGV1104 were digested with NotI and BamHI and ligated together to produce pGV2212. The Sc_BAT1 sequence was confirmed by sequencing (Laragen, Inc., Los Angeles, Calif.).

Construction of pGV1999

[0307] pGV1441 is a derivative of p423TEF (Mumberg, D. et al. (1995) Gene 156:119-122; obtained from ATCC), where the multiple cloning sites had been changed to SalI-EcoRI-SmaI-BamHI-NotI-XhoI. pGV1999 is a high-copy HIS3 marked yeast plasmid for overexpression of the S. cerevisiae cytosolic branched chain amino acid transaminase, Bat2p. The sequence for Sc_BAT2 was amplified from S. cerevisiae genomic DNA using primers 457 and 458. These primers introduced a SalI and BamHI sites at the 5′ and 3′ ends of the coding sequence. This PCR product was digested with SalI and BamHI and cloned into the same sites of pGV1441. The Sc_BAT2 sequence was confirmed by sequencing (Laragen, Inc., Los Angeles, Calif.).

Construction of Plasmids pGV1990 and pGV2015

[0308] To generate a fragment to clone into pGV1909, Ll_kivD was PCR amplified with primers 2038 and 2039 and KOD polymerase (Novagen, catalog #71086) using pGV1590 as template. The PCR amplified DNA was purified using the Qiagen PCR Purification Kit (Qiagen kit #28106). The purified PCR DNA and pGV1909 were digested with HinDIII and NotI. The digested PCR DNA was purified by ethanol precipitation, and the appropriately sized band from pGV1909 was excised from a 1% agarose gel and purified with a Zymoclean Gel DNA Recovery Kit (Zymo Research, Orange, Calif.; Catalog #D4002). The purified insert (PCR product) and vector DNA (pGV1909) were mixed in a 6:1 molar ratio with T4 DNA Ligase and buffer (New England Biolabs, Catalog M0202), and incubated at room temperature for two hours before transformation into chemically-competent E. coli. Transformants were screened by sequence analysis. One transformant contained pGV1990. Another transformant contained a plasmid that was the result of the re-ligation of pGV1909 without Ll_kivD, which was assigned the designation pGV2015.

Construction of Plasmid pGV2061:

[0309] pGV1811 and pGV2030 were digested with SalI and NotI. The DNA was gel purified from a 1% agarose gel using the Zymoclean Gel DNA Recovery Kit (Zymo Research, Orange, Calif.; Catalog #D4002). The purified insert and vector DNA fragments were mixed in a 5:1 molar ratio with T4 DNA Ligase and buffer (New England Biolabs, Catalog M0202), and incubated at room temperature for two hours before transformation into chemically-competent E. coli. Transformants were screened by PCR, restriction digestions, and sequence analysis. The fully verified candidate was name pGV2061.

Construction of Plasmid pGV2062:

[0310] To generate a fragment to clone into pGV1812, Sc_COX4:Bs_alsS was PCR amplified with primers 2105 and 2106 and KOD polymerase (Novagen, catalog #71086) using pGV1875 as template. The PCR amplified DNA was purified using the Zymoclean and Concentrator Kit (kit #28106). The purified PCR DNA and pGV1812 were digested with BamHI and XhoI. The digested DNA was resolved on a 1% agarose gel, and the DNA fragments were excised from the gel and purified with a Zymoclean Gel DNA Recovery Kit (Zymo Research, Orange, Calif.; Catalog #D4002). The purified insert (PCR product) and vector DNA (pGV1812) were mixed in a 5:1 molar ratio with T4 DNA Ligase and buffer (New England Biolabs, Catalog M0202), and incubated at room temperature for two hours before transformation into chemically-competent E. coli. Transformants were screened by PCR, restriction digestions, and sequence analysis. The fully verified candidate was named pGV2062.

[0311] The plasmids pGV9834 (SEQ ID NO: 11), and pGV7101 (SEQ ID NO: 10), are constructed by ligating a SOE-PCR product containing nucleotides coding for the MTS of Adh3p fused to the 5′ end of the ADH7 gene into the plasmids pGV1834 (SEQ ID NO: 8), and pGV7001 (SEQ ID NO: 9), respectively, wherein the SOE-PCR product and the plasmids are digested with NdeI and NcoI. The SOE-PCR product is prepared by amplifying the 5′ end of the ADH7 gene excluding the start codon using the primers ADH7F and ADH7R. ADH7F includes 20 nucleotides of homology to the 5′ sequence of ADH3. Two oligonucleotide containing the sense and the antisense strands of the coding sequence for the first 29 amino acids of Adh3p, a NcoI site, and 5 nucleotides that are homologous to the 5′ end of the ADH7 are synthesized and annealed. The PCR product and the annealed oligonucleotides are combined in a SOE reaction using the primers ADH37 and ADH7R.

| GEVO No. | Genotype/Source |
|---|---|
| A | Kluyveromyces marxianus ura3-Δ2 pdc1Δ::[P_{KmPDC1}:25ScCOX4- |
| | MTS:BsalsS:P_{ScTDH3}:LlkivD:ScHMI1- |
| | MTS:P_{ScADH1}:SCADH7:P_{ScFBA1}:ScURA3:P_{ScFBA1}:ScILV5:P_{ScTPI1}:ScILV3:T_{KmPDC1}] |
| A1 | Kluyveromyces marxianus ura3-Δ2 pdc1Δ::[P_{KmPDC1}:25COX4- |
| | MTS:BsalsS:P_{ScTDH3}:LlkivD:ScHMI1-MTS:P_{ScADH1}: ScADH3 |
| | MTS:ScADH7:P_{ScFBA1}:ScURA3:P_{ScFBA1}:ScILV5:P_{ScTPI1}:ScILV3:T_{KmPDC1}] |
| A1MB | Kluyveromyces marxianus ura3-Δ2 pdc1Δ::[P_{KmPDC1}:25ScCOX4- |
| | MTS:BsalsS:P_{ScTDH3}:LlkivD:ScHMI1-MTS:P_{ScADH}:ScADH3- |
| | MTS:ScADH7:P_{ScFBA1}:ScURA3:P_{ScFBA1}:ScILV5:P_{ScTPI1}:ScILV3:T_{KmPDC1}] |
| | [P_{ScTDH3}:ScPCK1:P_{ScADH1}:ScMDH2:P_{ScFBA1}:ScDIC1:P_{ScTPI1}:ScMAE1:P_{ScTEF1}:hph: |
| | T_{ScPDC6}] |
| A1N | Kluyveromyces marxianus ura3-Δ2 pdc1Δ::[P_{KmPDC1}:25ScCOX4-MTS:BsalsS: |
| | P_{ScTDH3}:LlkivD:ScHMI-MTS:P_{ScADH1}:ScADH3-MTS:DmADH: P_{ScFBA1}:ScURA3: |
| | P_{ScFBA1}:31COX4-MTS:EcilvCcoSc^{P2D1-A1-his6}: P_{ScTPI1}:ScILV3: T_{KmPDC1}] |
| A1P | Kluyveromyces marxianus ura3-Δ2 [P_{ScPDC1}:25ScCOX4- |
| | MTS:BsalsS:P_{ScTDH3}:LlkivD:ScHMI1-MTS:P_{ScADH1}: ScADH3- |
| | MTS:ScADH7:P_{ScFBA1}:ScURA3:P_{ScFBA1}:ScILV5:P_{ScTPI1}:ScILV3:T_{KmPDC1}] |
| A1PMB | Kluyveromyces marxianus ura3-Δ2 [P_{ScPDC1}:25ScCOX4- |
| | MTS:BsalsS:P_{ScTDH3}:LlkivD:ScHMI1-MTS:P_{ScADH}:ScADH3- |
| | MTS:ScADH7:P_{ScFBA1}:ScURA3:P_{ScFBA1}:ScILV5:P_{ScTPI1}:ScILV3:T_{KmPDC1}] |
| | [P_{ScTDH3}:ScPCK1:P_{ScADH1}:ScMDH2:P_{ScFBA1}:ScDIC1:P_{ScTPI1}:ScMAE1:P_{ScTEF1}:hph: |
| | T_{ScPDC6}] |
| A1PN | Kluyveromyces marxianus ura3-Δ2 [P_{ScPDC1}:25ScCOX4-MTS:BsalsS: |
| | P_{ScTDH3}:LlkivD ScHMI-MTS:P_{ScADH1}: ScADH3-MTS:DmADH |
| | P_{ScFBA1}:ScURA3:P_{ScFBA1}:31COX4-MTS:EcilvCcoSc^{P2D1-A1-his6}: |
| | P_{ScTPI1}:ScILV3:T_{ScPDC1}] |
| A1PTH | Kluyveromyces marxianus ura3-Δ2 [P_{ScPDC1}:25ScCOX4- |
| | MTS:BsalsS:P_{ScTDH3}:LlkivD:ScHMI1-MTS:P_{ScADH}: ScADH3- |
| | MTS:ScADH7:P_{ScFBA1}:ScURA3:P_{ScFBA1}:ScILV5:P_{ScTPI1}:ScILV3:T_{KmPDC1}] [P_{ScTDH3}:Nc |
| | Transhydrogenase:P_{ScTEF1}:hph] |
| A1TH | Kluyveromyces marxianus ura3-Δ2 pdc1Δ::[P_{KmPDC1}:25ScCOX4- |
| | MTS:BsalsS:P_{ScTDH3}:LlkivD:ScHMI1-MTS:P_{ScADH}: ScADH3- |
| | MTS:ScADH7:P_{ScFBA1}:ScURA3:P_{ScFBA1}:ScILV5:P_{ScTPI1}:ScILV3:T_{KmPDC1}] [P_{ScTDH3}:Nc |
| | Transhydrogenase:P_{ScTEF1}:hph] |
| AK | Kluyveromyces marxianus ura3-Δ2 pdc1Δ::[P_{KmPDC1}:25ScCOX4- |
| | MTS:BsalsS:P_{ScTDH3}:LlkivD:ScHMI1- |
| | MTS:P_{ScADH1}:ScADH7:P_{ScFBA1}:ScURA3:P_{ScFBA1}:31COX4-MTS:EcilvCcoSc^{P2D1-A1-his6}: |
| | P_{ScTPI1}:ScILV3:T_{KmPDC1}] |
| AKMB | Kluyveromyces marxianus ura3-Δ2 pdc1Δ::[P_{KmPDC1}:25ScCOX4- |
| | MTS:BsalsS:P_{ScTDH3}:LlkivD:ScHMI1- |
| | MTS:P_{ScADH1}:ScADH7:P_{ScFBA1}:ScURA3:P_{ScFBA1}:31COX4-MTS:EcilvCcoSc^{P2D1-A1-his6}: |
| | P_{ScTPI1}:ScILV3:T_{KmPDC1}] |
| | [P_{ScTDH3}:ScPCK1:P_{ScADH1}:ScMDH2:P_{ScFBA1}: ScDIC1:P_{ScTPI1}:ScMAE1:P_{ScTEF1}:hph: |
| | T_{ScPDC6}] |
| AKTH | Kluyveromyces marxianus ura3-Δ2 pdc1Δ::[P_{KmPDC1}:25ScCOX4- |
| | MTS:BsalsS:P_{ScTDH3}:LlkivD:ScHMI1- |
| | MTS:P_{ScADH1}:ScADH7:P_{ScFBA1}:ScURA3:P_{ScFBA1}:31COX4-MTS:EcilvCcoSc^{P2D1-A1-his6}: |
| | P_{ScTPI1}:ScILV3:T_{KmPDC1}] [P_{ScTDH3}:Nc Transhydrogenase:P_{ScTEF1}:hph] |
| AM | Kluyveromyces marxianus ura3-Δ2 pdc1Δ::[P_{KmPDC1}:25ScCOX4- |
| | MTS:BsalsS:P_{ScTDH3}:LlkivD:ScHMI1- |
| | MTS:P_{ScADH1}:DmADH:P_{ScFBA1}:ScURA3:P_{ScFBA1}:ScILV5:P_{ScTPI1}:ScILV3:T_{KmPDC1}] |
| AMB | Kluyveromyces marxianus ura3-Δ2 pdc1Δ::[P_{KmPDC1}:25ScCOX4- |
| | MTS:BsalsS:P_{ScTDH3}:LlkivD:ScHMI1- |
| | MTS:P_{ScADH1}:ScADH7:P_{ScFBA1}:ScURA3:P_{ScFBA1}:ScILV5:P_{ScTPI1}:ScILV3:T_{KmPDC1}] |
| | [P_{ScTDH3}:ScPCK1:P_{ScADH1}:ScMDH2:P_{ScFBA1}: ScDIC1:P_{ScTPI1}:ScMAE1:P_{ScTEF1}:hph: |
| | T_{ScPDC6}] |
| AMMB | Kluyveromyces marxianus ura3-Δ2 pdc1Δ::[P_{KmPDC1}:25ScCOX4- |
| | MTS:BsalsS:P_{ScTDH3}:LlkivD:ScHMI1- |
| | MTS:P_{ScADH1}:DmADH:P_{ScFBA1}:ScURA3:P_{ScFBA1}:ScILV5:P_{ScTPI1}:ScILV3:T_{KmPDC1}] |
| | [P_{ScTDH3}:ScPCK1:P_{ScADH1}:ScMDH2:P_{ScFBA1}: ScDIC1:P_{ScTPI1}:ScMAE1:P_{ScTEF1}:hph: |
| | T_{ScPDC6}] |
| AMTH | Kluyveromyces marxianus ura3-Δ2 pdc1Δ::[P_{KmPDC1}:25ScCOX4- |
| | MTS:BsalsS:P_{ScTDH3}:LlkivD:ScHMI1- |
| | MTS:P_{ScADH1}:DmADH:P_{ScFBA1}:ScURA3:P_{ScFBA1}:ScILV5:P_{ScTPI1}:ScILV3:T_{KmPDC1}] |
| | [P_{ScTDH3}:Nc Transhydrogenase:P_{ScTEF1}:hph] |
| AN | Kluyveromyces marxianus ura3-Δ2 pdc1 Δ::[P_{KmPDC1}:25ScCOX4-MTS:BsalsS: |
| | P_{ScTDH3}:LlkivD ScHMI-MTS: P_{ScADH1}: DmADH: P_{ScFBA1}:ScURA3: |
| | P_{ScFBA1}:31COX4-MTS:EcilvCcoSc^{P2D1-A1-his6}: P_{ScTPI1}:ScILV3: T_{KmPDC1}] |
| AP | Kluyveromyces marxianus ura3-Δ2 [P_{ScPDC1}:25ScCOX4- |
| | MTS:BsalsS:P_{ScTDH3}:LlkivD:ScHMI1- |
| | MTS:P_{ScADH1}:ScADH7:P_{ScFBA1}:ScURA3:P_{ScFBA1}:ScILV5:P_{ScTPI1}:ScILV3:T_{ScPDC1}] |
| APM | Kluyveromyces marxianus ura3-Δ2 [P_{ScPDC1}:25ScCOX4- |
| | MTS:BsalsS:P_{ScTDH3}:LlkivD:ScHMI1- |
| | MTS:P_{ScADH1}:DmADH:P_{ScFBA1}:ScURA3:P_{ScFBA1}:ScILV5:P_{ScTPI1}:ScILV3:T_{ScPDC1}] |
| APMB | Kluyveromyces marxianus ura3-Δ2 [P_{ScPDC1}:25ScCOX4- |
| | MTS:BsalsS:P_{ScTDH3}:LlkivD:ScHMI1- |
| | MTS:P_{ScADH1}:ScADH7:P_{ScFBA1}:ScURA3:P_{ScFBA1}:SCILV5:P_{ScTPI1}:ScILV3:T_{ScPDC1}] |
| | [P_{ScTDH3}:ScPCK1:P_{ScADH1}:ScMDH2:P_{ScFBA1}: ScDIC1:P_{ScTPI1}:ScMAE1:P_{ScTEF1}:hph: |
| | T_{ScPDC6}] |
| APMMB | Kluyveromyces marxianus ura3-Δ2 [P_{ScPDC1}:25ScCOX4- |
| | MTS:BsalsS:P_{ScTDH3}:LlkivD:ScHMI1- |
| | MTS:P_{ScADH1}:DmADH:P_{ScFBA1}:ScURA3:P_{ScFBA1}:ScILV5:P_{ScTPI1}:ScILV3:T_{ScPDC1}] |
| | [P_{ScTDH3}:ScPCK1:P_{ScADH1}:ScMDH2:P_{ScFBA1}: ScDIC1:P_{ScTPI1}:ScMAE1:P_{ScTEF1}:hph: |
| | T_{ScPDC6}] |
| APMTH | Kluyveromyces marxianus ura3-Δ2 [P_{ScPDC1}:25ScCOX4- |
| | MTS:BsalsS:P_{ScTDH3}:LlkivD:ScHMI1- |
| | MTS:P_{ScADH1}:DmADH:P_{ScFBA1}:ScURA3:P_{ScFBA1}:ScILV5:P_{ScTPI1}:ScILV3:T_{ScPDC1}] |
| | [P_{ScTDH3}:Nc Transhydrogenase:P_{ScTEF1}:hph] |
| APN | Kluyveromyces marxianus ura3-Δ2 [P_{ScPDC1}:25ScCOX4- |
| | MTS:BsalsS:P_{ScTDH3}:LlkivD:ScHMI1- |
| | MTS:P_{ScADH1}:DmADH:P_{ScFBA1}:ScURA3:P_{ScFBA1}:31COX4- |
| | MTS:EcilvCcoSc^{P2D1-A1-his6}:P_{ScTPI1}:ScILV3:T_{ScPDC1}] |
| APTH | Kluyveromyces marxianus ura3-Δ2 [P_{ScPDC1}:25ScCOX4- |
| | MTS:BsalsS:P_{ScTDH3}:LlkivD:ScHMI1- |
| | MTS:P_{ScADH1}:ScADH7:P_{ScFBA1}:ScURA3:P_{ScFBA1}:SCILV5:P_{ScTPI1}:ScILV3:T_{ScPDC1}] |
| | [P_{ScTDH3}:Nc Transhydrogenase:P_{ScTEF1}:hph] |
| ATH | Kluyveromyces marxianus ura3-Δ2 pdc1Δ::[P_{KmPDC1}:25ScCOX4- |
| | MTS:BsalsS:P_{ScTDH3}:LlkivD:HMI1- |
| | MTS:P_{ScADH1}:ScADH7:P_{ScFBA1}:ScURA3:P_{ScFBA1}:ScILV5:P_{ScTPI1}:ScILV3:T_{KmPDC1}] |
| | [P_{ScTDH3}:Nc Transhydrogenase:P_{ScTEF1}:hph] |
| c2i-SC1 | S. cerevisiae MATa his3 trp1 ura3 pdc5::ble pdc6::apt1(kanR) ho |
| | pdc1Δ::(P_{ScPDC1}:25ScCOX4-MTS:BsalsS:P_{ScTDH3}:LlkivD:ScHMI1- |
| | MTS:P_{ScADH1}:ScADH7:P_{ScFBA1}:ScURA3:P_{ScFBA1}:ScILV5:P_{ScTPI1}:ScILV3:T_{ScPDC1}) |
| | Evolved to be C2-independent |
| c2i-SC1M | S. cerevisiae MATa his3 trp1 ura3 pdc5::ble pdc6::apt1(kanR) ho |
| | pdc1Δ::[P_{ScPDC1}:25ScCOX4-MTS:BsalsS:P_{ScTDH3}:LlkivD:ScHMI1- |
| | MTS:P_{ScADH1}:DmADH:P_{ScFBA1}:ScURA3:P_{ScFBA1}:ScILV5:P_{ScTPI1}:ScILV3:T_{ScPDC1}] |
| | Evolved to be C2-independent |
| c2i-SC1MB | S. cerevisiae MATa his3 trp1 ura3 pdc5::ble ho pdc1Δ::[P_{ScPDC1}:25ScCOX4- |
| | MTS:BsalsS:P_{ScTDH3}:LlkivD:ScHMI1- |
| | MTS:P_{ScADH1}:ScADH7:P_{ScFBA1}:ScURA3:P_{ScFBA1}:ScILV5:P_{ScTPI1}:ScILV3:T_{ScPDC1}) |
| | pdc6Δ::[P_{ScTDH3}:ScPCK1:P_{ScADH1}:ScMDH2:P_{ScFBA1}:ScDIC1:P_{ScTPI1}:ScMAE1: |
| | P_{ScTEF1}:hph:T_{ScPDC6}] Evolved to be C2-independent |
| c2i-SC1MMB | S. cerevisiae MATa his3 trp1 ura3 pdc5::ble pdc6::apt1(kanR) ho |
| | pdc1Δ::[P_{ScPDC1}:25ScCOX4-MTS:BsalsS:P_{ScTDH3}:LlkivD:ScHMI1- |
| | MTS:P_{ScADH1}:DmADH:P_{ScFBA1}:ScURA3:P_{ScFBA1}:ScILV5:P_{ScTPI1}:ScILV3:T_{ScPDC1}) |
| | pdc6 Δ::[P_{ScTDH3}:ScPCK1:P_{ScADH1}:ScMDH2:P_{ScFBA1}:ScDIC1:P_{ScTPI1}:ScMAE1: |
| | P_{ScTEF1}:hph:T_{ScPDC6}] Evolved to be C2-independent |
| c2i-SC1MTH | S. cerevisiae MATa his3 trp1 ura3 pdc5::ble pdc6::apt1(kanR) ho |
| | pdc1Δ::[P_{ScPDC1}:25ScCOX4-MTS:BsalsS:P_{ScTDH3}:LlkivD:ScHMI1- |
| | MTS:P_{ScADH1}:DmADH:P_{ScFBA1}:ScURA3:P_{ScFBA1}:ScILV5:P_{ScTPI1}:ScILV3:T_{ScPDC1}] |
| | pdc6 Δ::[P_{ScTDH3}: Nc Transhydrogenase:P_{ScTEF1}:hph] Evolved to be C2- |
| | independent |
| c2i-SC1N | S. cerevisiae MATa his3 trp1 ura3 pdc5::ble pdc6::apt1(kanR) ho |
| | pdc1Δ::[P_{PDC1}:25COX-MTS:BsalsS:P_{TDH3}:LlkivD:ScHMI1- |
| | MTS:P_{ScADH1}:DmADH:P_{FBA1}:URA3:P_{FBA1}:31COX4-MTS:EcilvCcoSc^{P2D1-A1-his6}: |
| | P_{TPI1}:ILV3:T_{PDC1}] Evolved to be C2-independent |
| c2i-SC1TH | S. cerevisiae MATa his3 trp1 ura3 pdc5::ble ho pdc1Δ::[P_{ScPDC1}:25ScCOX4- |
| | MTS:BsalsS:P_{ScTDH3}:LlkivD:ScHMI1- |
| | MTS:P_{ScADH1}:ScADH7:P_{ScFBA1}:ScURA3:P_{ScFBA1}:ScILV5:P_{ScTPI1}:ScILV3:T_{ScPDC1} |
| | [pdc6 Δ::[P_{ScTDH3}: Nc Transhydrogenase:P_{ScTEF1}:hph] Evolved to be C2- |
| | independent |
| c2i-SCA1 | S. cerevisiae MATa his3 trp1 ura3 pdc5::ble pdc6::apt1(kanR) ho |
| | pdc1Δ::[P_{ScPDC1}:25ScCOX4-MTS:BsalsS:P_{ScTDH3}:LlkivD:ScHMI1- |
| | MTS:P_{ScADH1}:ScADH3- |
| | MTS:ScADH7:P_{ScFBA1}:ScURA3:P_{ScFBA1}:ScILV5:P_{ScTPI1}:ScILV3:T_{ScPDC1}] Evolved to |
| | be C2-independent |
| c2i-SCA1MB | S. cerevisiae MATa his3 trp1 ura3 pdc5::ble pdc6::apt1(kanR) ho |
| | pdc1Δ::[P_{ScPDC1}:25ScCOX4-MTS:BsalsS:P_{ScTDH3}:LlkivD:ScHMI1- |
| | MTS:P_{ScADH1}:ScADH3- |
| | MTS:ScADH7:P_{ScFBA1}:ScURA3:P_{ScFBA1}:ScILV5:P_{ScTPI1}:ScILV3:T_{ScPDC1}] |
| | pdc6Δ::[P_{ScTDH3}:ScPCK1:P_{ScADH1}:ScMDH2:P_{ScFBA1}:ScDIC1:P_{ScTPI1}:ScMAE1: |
| | P_{ScTEF1}:hph:T_{ScPDC6}] Evolved to be C2-independent |
| c2i-SCA1N | S. cerevisiae MATa his3 trp1 ura3 pdc5::ble pdc6::apt1(kanR) ho |
| | pdc1Δ::[P_{PDC1}:25COX4-MTS:BsalsS:P_{TDH3}:LlkivD:ScHMI1- |
| | MTS:P_{ScADH1}:ScADH3-MTS:DmADH:P_{ScFBA1}:ScURA3: P_{FBA1}:31COX4- |
| | MTS:EcilvCcoSc^{P2D1-A1-his6}:P_{ScTPI1}:ScILV3: T_{PDC1}] Evolved to be C2-independent |
| c2i-SCA1TH | S. cerevisiae MATa his3 trp1 ura3 pdc5::ble pdc6::apt1(kanR) ho |
| | pdc1Δ::[P_{ScPDC1}:25ScCOX4-MTS:BsalsS:P_{ScTDH3}:LlkivD:ScHMI1- |
| | MTS:P_{ScADH1}:ScADH3- |
| | MTS:ScADH7:P_{ScFBA1}:ScURA3:P_{ScFBA1}:ScILV5:P_{ScTPI1}:ScILV3:T_{ScPDC1}] |
| | pdc6Δ::[P_{ScTDH3}:Nc Transhydrogenase:P_{ScTEF1}:hph]vEvolved to be C2-independent |
| GEVO1068 | Kluyveromyces marxianus (NRRL-Y-7571 from USDA) |
| GEVO1186 | S. cerevisiae CEN.PK, ura3/ura3 leu2/leu2 his3/his3 trp1/trp1 ADE2 MAT a/alpha |
| GEVO1187 | Saccharomyces cerevisiae (CEN.PK2-1C) |
| | MATa ura3 leu2 his3 trp1 ADE2 |
| GEVO1537 | Saccharomyces cerevisiae (GG570 from Prof. Paul can Heusden, Univ. of Leiden, |
| | Netherlands) MATa/MATalpha HIS3/HIS3 LEU2/LEU2 TRP1/TRP1 URA3/URA3 |
| | pdc1::ble/pdc1::ble pdc5::ble/pdc5::ble pdc6::apt1(kanR)/pdc6::apt1(kanR) |
| | HO/HO |
| GEVO1584 | S. cerevisiae MAT a his3 trp1 ura3 leu2 pdc1::ble pdc5::ble pdc6::apt1(kanR) ho |
| GEVO1802 | S. cerevisiae CEN.PK MATa/alpha ura3/ura3 leu2/leu2 his3/his3 trp1/trp1 |
| | pdc6Δ::[ScURA3:ampR:PMB1:P_{ScTEF1}:LlkivD2:P_{ScTDH3}:ScADH7: T_{ScPDC6}]/PDC6 |
| GEVO1803 | MATa/α ura3/ura3 leu2/leu2 his3/his3 trp1/trp1 pdc1Δ::[ScTRP1:bla:pUC |
| | ori:P_{ScCUP1-1}:Bs_alsS2::T_{Sc}_{_{—}}_{PDC1}]/PDC1 |
| GEVO1805 | S. cerevisiae CEN.PK MATa/alpha ura3/ura3 leu2/leu2 his3/his3 trp1/trp1 |
| | pdc5Δ::[ScLEU2:ampR:PMB1:P_{ScTEF1}:EcilvDΔNcoKl:P_{ScTDH3}:EcilvCΔN: |
| | T_{ScPDC5}]/PDC5 pdc6Δ::[ScURA3:ampR:PMB1:P_{ScTEF1}:LlkivD2:P_{ScTDH3}:ScADH7: |
| | T_{ScPDC6}]/PDC6 |
| GEVO1820 | S. cerevisiae CEN.PK MAT a/alpha ura3/ura3 leu2/leu2 his3/his3 trp1/trp1 |
| | pdc1Δ::[ScTRP1:bla:pUC ori:P_{ScCUP1-1}:Bs_alsS2::T_{Sc}_{_{—}}_{PDC1}]/PDC1 pdc5 |
| | Δ::[ScLEU2:ampR:PMB1:P_{ScTEF1}:EcilvDΔNcoKl:P_{ScTDH3}: EcilvCΔN: T_{ScPDC5}]/ |
| | PDC5 pdc6 Δ::[ScURA3:ampR:PMB1:P_{ScTEF1}: LlkivD2:P_{ScTDH3}:ScADH7:T_{ScPDC6}]/ |
| | PDC6 |
| GEVO1863 | Saccharomyces cerevisiae MAT a his3 trp1 ura3 pdc1::ble pdc5::ble |
| | pdc6::apt1(kanR) ho. Evolved to be C2-independent |
| GEVO1947 | Kluyveromyces marxianus ura3-Δ2 |
| GEVO1969 | K. marxianus NRRL-Y-7571 ura3-Δ2 pdc1Δ::G418^{R} |
| GEVO2062 | S. cerevisiae CEN.PK MAT a/alpha ura3/ura3 leu2/leu2 his3/his3 trp1/trp1 |
| | ho/ho, pdc1Δ::[P_{ScPDC1}25COX4-MTS:Bs_alsSP_{ScTDH3}:Sc_ARO10:ScHMI1- |
| | MTS:P_{ScADH1}:Sc_ADH7:P_{Sc}FBA1:ScURA3] |
| GEVO2072 | S. cerevisiae CEN.PK MAT a/alpha ura3/ura3 leu2/leu2 his3/his3 trp1/trp1 |
| | ho/ho, PDC1/pdc1::[P_{ScPDC1}:31COX4-MTS:Bs_alsS:P_{ScTDH3}:Ll_kivD:ScHMI1- |
| | MTS:P_{ScADH1}:Sc_ADH7:P_{Sc}_{_{—}}_{FBA1}:ScURA3] |
| GEVO2087 | Kluyveromyces marxianus, ura3-Δ2 [P_{ScPDC1}:31COX4- |
| | MTS:BsalsS:P_{ScTDH3}:LlkivD:ScHMI1-MTS:P_{ScADH1}:ScADH7:PScFBA1:URA3] |
| GEVO2088 | Kluyveromyces marxianus, ura3-Δ2 [P_{ScPDC1}:31COX4- |
| | MTS:Bs_alsS:P_{ScTDH3}:LlkivD:ScHMI1-MTS:P_{ScADH1}:ScADH7:PSc_{FBA1}:URA3] |
| GEVO2107 | MATa/α ura3/ura3 leu2/leu2 his3/his3 trp1/trp1 pdc1Δ::[Bs_alsS2; TRP1]/PDC1 |
| | pdc6Δ::[P_{ScTEF1}:Llkivd:P_{ScTDH3}:DmADH ScURA3]/PDC6 |
| GEVO2119 | Saccharomyces cerevisiae diploid of CEN.PK parent strain, MAT-a/alpha |
| | ura3/ura3 leu2/leu2 his3/his3 trp1/trp1 ho/ho, pdc1Δ::[P_{ScPDC1}:25COX4- |
| | MTS:Bs_alsS:P_{ScTDH3}:LlkivD:HMI1-MTS:P_{ScADH1}:ScADH7: P_{ScFBA1}:ScURA3]/ |
| | PDC1 |
| GEVO2120/ | Saccharomyces cerevisiae diploid of CEN.PK parent strain, MAT-a/alpha |
| 2121 | ura3/ura3 leu2/leu2 his3/his3 trp1/trp1 ho/ho, pdc1Δ::[P_{ScPDC1}:31COX4- |
| | MTS:Bs_alsS:P_{ScTDH3}:ARO10:ScHMI1-MTS:P_{ScADH1}:ScADH7: |
| | P_{ScFBA1}:ScURA3]/PDC1 |
| GEVO2122/ | Saccharomyces cerevisiae diploid of CEN.PK parent strain, MAT-a/alpha |
| 2123 | ura3/ura3 leu2/leu2 his3/his3 trp1/trp1 ho/ho, pdc1Δ::[P_{ScPDC1}:ScILV2: |
| | P_{ScTDH3}:Ll_kivd:ScHMI1-MTS:P_{ScADH1}:ScADH7:P_{ScFBA1}:ScURA3]/PDC1 |
| GEVO2124/ | Saccharomyces cerevisiae diploid of CEN.PK parent strain, MAT-a/alpha |
| 2125 | ura3/ura3 leu2/leu2 his3/his3 trp1/trp1 ho/ho, pdc1Δ::[P_{ScPDC1}:ScILV2: |
| | P_{ScTDH3}:ScARO10:ScHMI1-MTS:P_{ScADH1}:ScADH7:P_{ScFBA1}:ScURA3]/PDC1 |
| GEVO2126 | Saccharomyces cerevisiae diploid of CEN.PK parent strain, MAT-a/alpha |
| | ura3/ura3 leu2/leu2 his3/his3 trp1/trp1 ho/ho, pdc1Δ::[P_{ScPDC1}:ScILV2: |
| | P_{ScTDH3}:Ll_kivd:ScHMI1-MTS:P_{ScADH1}:ScILV6*:P_{ScFBA1}:ScURA3]/PDC1 |
| GEVO2127/ | Saccharomyces cerevisiae diploid of CEN.PK parent strain, MATa/alpha |
| 2128 | ura3/ura3 leu2/leu2 his3/his3 trp1/trp1 ho/ho, PDC1/pdc1Δ::[P_{Sc}_{_{—}}_{PDC1}: 31COX4- |
| | MTS:Bs_alsS:P_{Sc}_{_{—}}_{ADH1}:Sc_ADH7:P_{Sc}_{_{—}}_{FBA1}:ScURA3] |
| GEVO2129/2130 | Saccharomyces cerevisiae diploid of CEN.PK parent strain, MATa/alpha |
| | ura3/ura3 leu2/leu2 his3/his3 trp1/trp1 ho/ho, PDC1/pdc1 Δ::[P_{Sc}_{_{—}}_{PDC1}: 31COX4- |
| | MTS:Bs_alsS:P_{Sc}_{_{—}}_{TDH3}:LlkivD:ScHMI1-MTS:P_{Sc}_{_{—}}_{FBA1}: ScURA3] |
| GEVO2131/2132 | Saccharomyces cerevisiae diploid of CEN.PK parent strain, MATa/alpha |
| | ura3/ura3 leu2/leu2 his3/his3 trp1/trp1 ho/ho, PDC1/pdc1Δ::[P_{Sc}_{_{—}}_{PDC1}: |
| | LlkivD:ScHMI1-MTS:P_{Sc}_{_{—}}_{ADH1}:ScADH7:P_{Sc}_{_{—}}_{FBA1}:ScURA3] |
| GEVO2158 | MATa/α ura3/ura3 leu2/leu2 his3/his3 trp1/trp1 pdc1 Δ::[BsalsS2: TRP1]/PDC1 |
| | pdc5 Δ::[P_{ScTEF1}:ILV3ΔN:P_{ScTDH3}:ilvCco(Sc)^{Q110V}:LEU2]/PDC5 |
| | pdc6Δ::[P_{ScTEF1}:LlkivD:P_{ScTDH3}:DmADH:ScURA3]/PDC6 |
| GEVO2166 | S. cerevisiae MATa his3 trp1 ura3 leu2 pdc1Δ::[P_{ScPDC1}:25ScCOX4- |
| | MTS:BsalsS:P_{ScTDH3}:LlkivD:ScHMI1-MTS:P_{ScADH1}:ScADH7:P_{ScFBA1}:ScURA3] |
| | pdc5::ble pdc6::apt1(kanR) ho |
| GEVO2167 | S. cerevisiae MATa his3 trp1 ura3 leu2 pdc1Δ::[P_{ScPDC1}:25ScCOX4- |
| | MTS:BsalsS:P_{ScTDH3}:LlkivD: ScHMI1-MTS:P_{ScADH1}:ScADH7:P_{ScFBA1}:ScURA3] |
| | pdc5::ble pdc6::apt1(kanR) |
| GEVO2276 | K. marxianus NRRL-Y-7571 ura3-Δ2 pdc1Δ::[P_{ScPDC1}:31ScCOX4- |
| | MTS:BsalsS:P_{ScTDH3}:LlkivD:ScHMI1- |
| | MTS:P_{ScADH1}:ScADH7:P_{ScFBA1}:ScURA3:T_{ScPDC1}] RANDOMLY INTEGRATED, |
| | Candidate #1 |
| GEVO2277 | K. marxianus NRRL-Y-7571 ura3-Δ2 pdc1Δ::[P_{ScPDC1}:31ScCOX4- |
| | MTS:BsalsS:P_{ScTDH3}:LlkivD:ScHMI1-MTS:P_{ScADH1}:ScADH7:P_{ScFBA1}:ScURA3: |
| | T_{ScPDC1}] RANDOMLY INTEGRATED Candidate #2 |
| GEVO2302 | S. cerevisiae haploid of CEN.PK parent strain MATa ura3 leu2 his3 trp1 |
| | pdc1Δ::[BsalsS2:TRP1] pdc5Δ::[P_{TEF1}:ScILV3ΔN P_{TDH3}:EcilvCco(Sc)^{Q110V}:LEU2] |
| | pdc6Δ::[P_{TEF1}:Ll_kivd2:P_{TDH3}:DmADH: URA3] |
| GEVO2346 | K. marxianus NRRL-Y-7571 ura3-Δ2 pdc1Δ::G418^{R} [P_{ScPDC1}:31ScCOX4- |
| | MTS:BsalsS:P_{ScTDH3}:LlkivD2:P_{ScFBA1}:ScURA3:T_{ScPDC1}] RANDOMLY |
| | INTEGRATED Candidate pGV1990 #4 |
| GEVO2347 | K. marxianus NRRL-Y-7571 ura3-Δ2 pdc1Δ::G418^{R} [P_{ScPDC1}:31ScCOX4-MTS: |
| | BsalsS: P_{ScTDH3}:LlkivD2:P_{ScFBA1}:ScURA3:T_{ScPDC1}] RANDOMLY INTEGRATED |
| | Candidate pGV1990 #5 |
| GEVO2348 | K. marxianus NRRL-Y-7571 ura3-Δ2 pdc1Δ::G418^{R} [P_{ScPDC1}:31ScCOX4- |
| | MTS:BsalsS:P_{ScTDH3}:P_{ScFBA1}:ScURA3:T_{ScPDC1}] RANDOMLY INTEGRATED |
| | Candidate pGV2015 #2 |
| GEVO2542 | K. marxianus NRRL-Y-7571 ura3-Δ2 pdc1Δ::[LlkivD2:P_{ScTDH3}: |
| | DmADH:P_{ScFBA1}:31ScCOX4-MTS:Bs_alsS] |
| GEVO2878 | S. cerevisiae CEN.PK MAT a/alpha ura3/ura3 leu2/leu2 his3/his3 trp1/trp1 |
| | ho/ho, pdc1Δ::[P_{ScPDC1}31COX4-MTS:BsalsS:P_{ScTDH3}: LlkivD:ScHMI1-MTS:P_{ScADH1} |
| | ScADH7:P_{ScFBA1}URA3] [P_{ScTDH3}ScBAT1, 2μ, TRP1] [P_{ScTEF1}ScBAT2, 2μ, |
| | HIS3] |
| GEVO2879 | S. cerevisiae CEN.PK MAT a/alpha ura3/ura3 leu2/leu2 his3/his3 trp1/trp1 |
| | ho/ho, pdc1Δ::[P_{ScPDC1}31COX4-MTS:BsalsS: P_{ScTDH3}:LlkivD:ScHMI1- |
| | MTS:P_{ScADH1}ScADH7:P_{ScFBA1}URA3] [P_{ScTDH3}ScBAT1, 2μ, TRP1] [P_{ScTEF1}Sc_BAT2, |
| | 2μ, HIS3] |
| GEVO2880 | S. cerevisiae CEN.PK MAT a/alpha ura3/ura3 leu2/leu2 his3/his3 trp1/trp1 |
| | ho/ho, pdc1Δ::[P_{ScPDC1}31COX4-MTS:BsalsS_co_Sc:P_{ScTDH3}:LlkivD: ScHMI1- |
| | MTS: P_{ScADH1}Sc_ADH7:P_{ScFBA1}URA3] [P_{ScTDH3}Sc_BAT1, 2μ, TRP1] |
| | [P_{ScTEF1}Sc_BAT2, 2μ, HIS3] |
| GEVO7777 | S. cerevisiae MATa his3 trp1 ura3 pdc5::ble pdc6::apt1(kanR) ho |
| SC1 | S. cerevisiae MATa his3 trp1 ura3 pdc5::ble pdc6::apt1(kanR) ho |
| | pdc1Δ::[P_{ScPDC1}:25ScCOX4-MTS:BsalsS:P_{ScTDH3}::LlkivD:ScHMI1- |
| | MTS:P_{ScADH1}:ScADH7:P_{ScFBA1}:ScURA3:P_{ScFBA1}:ScILV5: P_{ScTPI1}:ScILV3:T_{ScPDC1}] |
| SC1M | S. cerevisiae MATa his3 trp1 ura3 pdc5::ble pdc6::apt1(kanR) ho |
| | pdc1Δ::[P_{ScPDC1}:25ScCOX4-MTS:BsalsS:P_{ScTDH3}:LlkivD:ScHMI1- |
| | MTS:P_{ScADH1}:DmADH:P_{ScFBA1}:ScURA3:P_{ScFBA1}:ScILV5:P_{ScTPI1}:ScILV3:T_{ScPDC1}] |
| SC1MB | S. cerevisiae MATa his3 trp1 ura3 pdc5::ble ho |
| | pdc1Δ::[P_{ScPDC1}:25ScCOX4:BsalsS:P_{ScTDH3}:LlkivD:ScHMI1- |
| | MTS:P_{ScADH1}:ScADH7:P_{ScFBA1}:ScURA3:P_{ScFBA1}:ScILV5:P_{ScTPI1}:ScILV3:T_{ScPDC1}] |
| | pdc6Δ::[P_{ScTDH3}:ScPCK1:P_{ScADH1}:ScMDH2:P_{ScFBA1}:ScDIC1:P_{ScTPI1}:ScMAE1: |
| | P_{ScTEF1}:hph:T_{ScPDC6}] |
| SC1MMB | S. cerevisiae MATa his3 trp1 ura3 pdc5::ble pdc6::apt1(kanR) ho |
| | pdc1Δ::[P_{ScPDC1}:25ScCOX4-MTS:BsalsS:P_{ScTDH3}:LlkivD:ScHMI1- |
| | MTS:P_{ScADH1}:DmADH:P_{ScFBA1}:ScURA3:P_{ScFBA1}:ScILV5:P_{ScTPI1}:ScILV3:T_{ScPDC1}] |
| | pdc6Δ::[P_{ScTDH3}:ScPCK1:P_{ScADH1}:ScMDH2:P_{ScFBA1}:ScDIC1:P_{ScTPI1}:ScMAE1: |
| | P_{ScTEF1}:hph:T_{ScPDC6}] |
| SC1MTH | S. cerevisiae MATa his3 trp1 ura3 pdc5::ble (kanR) ho |
| | pdc1Δ::[P_{ScPDC1}:25ScCOX4-MTS:BsalsS:P_{ScTDH3}:LlkivD:ScHMI1- |
| | MTS:P_{ScADH1}:DmADH:P_{ScFBA1}:ScURA3:P_{ScFBA1}:ScILV5:P_{ScTPI1}:ScILV3:T_{ScPDC1}] |
| | pdc6Δ::[P_{ScTDH3}:Nc Transhydrogenase:P_{ScTEF1}:hph] |
| SC1N | S. cerevisiae MATa his3 trp1 ura3 pdc5::ble pdc6::apt1(kanR) ho |
| | pdc1Δ::[P_{PDC1}:25COX4-MTS:BsalsS:P_{TDH3}:LlkivD:ScHMI1-MTS: |
| | P_{ScADH1}:DmADH: P_{ScFBA1}:URA3: P_{ScFBA1}:31COX4-MTS:EcilvCcoSc^{P2D1-A1-his6}: |
| | P_{ScTPI1}:ILV3: T_{PDC1}] |
| SC1TH | S. cerevisiae MATa his3 trp1 ura3 pdc5::ble ho pdc1Δ::[P_{ScPDC1}:25ScCOX4- |
| | MTS:BsalsS:P_{ScTDH3}:LlkivD:ScHMI1- |
| | MTS:P_{ScADH1}:ScADH7:P_{ScFBA1}:ScURA3:P_{ScFBA1}:ScILV5:P_{ScTPI1}:ScILV3: T_{ScPDC1}] |
| | pdc6Δ::[P_{ScTDH3}:Nc Transhydrogenase:P_{ScTEF1}:hph] |
| SCA1 | S. cerevisiae MATa his3 trp1 ura3 pdc5::ble pdc6::apt1(kanR) ho |
| | pdc1Δ::[P_{ScADH1}:25ScCOX4-MTS:BsalsS:P_{ScTDH3}:LlkivD:ScHMI1- |
| | MTS:P_{ScADH1}:ScADH3- |
| | MTS:ScADH7:P_{ScFBA1}:ScURA3:P_{ScFBA1}:ScILV5:P_{ScTPI1}:ScILV3:T_{ScPDC1}] |
| SCA1MB | S. cerevisiae MATa his3 trp1 ura3 pdc5::ble pdc6::apt1(kanR) ho |
| | pdc1Δ::[P_{ScPDC1}:25ScCOX4-MTS:BsalsS:P_{ScTDH3}:LlkivD:ScHMI1- |
| | MTS:P_{ScADH}:ScADH3-MTS: |
| | ScADH7:P_{ScFBA1}:ScURA3:P_{ScFBA1}:ScILV5:P_{ScTPI1}:ScILV3:T_{ScPDC1}] |
| | pdc6Δ::[P_{ScTDH3}:ScPCK1:P_{ScADH1}:ScMDH2:P_{ScFBA1}:ScDIC1:P_{ScTPI1}:ScMAE1: |
| | P_{ScTEF1}:hph:T_{ScPDC6}] |
| SCA1N | S. cerevisiae MATa his3 trp1 ura3 pdc5::ble pdc6::apt1(kanR) ho |
| | pdc1Δ::[P_{PDC1}:25COX4-MTS:BsalsS:P_{TDH3}:LlkivD:ScHMI1- |
| | MTS:P_{ScADH1}:ScADH3-MTS:DmADH: P_{ScFBA1}:ScURA3: P_{ScFBA1}:31COX4- |
| | MTS:EcilvCcoSc^{P2D1-A1-his6}:P_{ScTPI1}:ScILV3:T_{PDC1}] |
| SCA1TH | S. cerevisiae MATa his3 trp1 ura3 pdc5::ble pdc6::apt1(kanR) ho |
| | pdc1Δ::[P_{ScPDC1}:25ScCOX4-MTS:BsalsS:P_{ScTDH3}:LlkivD:ScHMI1- |
| | MTS:P_{ScADH}:ScADH3-MTS: |
| | ScADH7:P_{ScFBA1}:ScURA3:P_{ScFBA1}:ScILV5:P_{ScTPI1}:ScILV3:T_{ScPDC1}] |
| | pdc6Δ::[P_{ScTDH3}:Nc Transhydrogenase:P_{ScTEF1}:hph] |
| SCP1 | S. cerevisiae MAT-a/alpha ura3/ura3 leu2/leu2 his3/his3 trp1/trp1 ho/ho |
| | pdc1Δ:: P_{ScPDC1}:25ScCOX4-MTS:BsalsS:P_{ScTDH3}:LlkivD:ScHMI1- |
| | MTS:P_{ScADH1}:ScADH7:P_{ScFBA1}:ScURA3:P_{ScFBA1}:ScILV5:P_{ScTPI1}:ScILV3:T_{ScPDC1}]/PDC1 |
| SCP1K | S. cerevisiae MAT-a/alpha ura3/ura3 leu2/leu2 his3/his3 trp1/trp1 ho/ho |
| | pdc1Δ::[P_{ScPDC1}:25ScCOX4-MTS:BsalsS:P_{ScTDH3}:LlkivD:ScHMI1- |
| | MTS:P_{ScADH1}:ScADH7:P_{ScFBA1}:ScURA3:P_{ScFBA1}:31COX4-MTS:EcilvCcoSc^{P2D1-A1-his6}: |
| | P_{ScTPI1}:ScILV3:T_{ScPDC1}]/PDC1 |
| SCP1KMB | S. cerevisiae MAT-a/alpha ura3/ura3 leu2/leu2 his3/his3 trp1/trp1 ho/ho pdc1Δ:: |
| | P_{ScPDC1}:25ScCOX4-MTS:BsalsS:P_{ScTDH3}:LlkivD:ScHMI1- |
| | MTS:P_{ScADH1}:ScADH7:P_{ScFBA1}:ScURA3:P_{ScFBA1}:31COX4-MTS:EcilvCcoSc^{P2D1-A1-his6}: |
| | P_{ScTPI1}:ScILV3:T_{ScPDC1}]/PDC1 |
| | pdc6Δ::[P_{ScTDH3}:ScPCK1:P_{ScADH1}:ScMDH2:P_{ScFBA1}:ScDIC1:P_{ScTPI1}:ScMAE1: |
| | P_{ScTEF1}:hph:T_{ScPDC6}]/PDC6 |
| SCP1KTH | S. cerevisiae MAT-a/alpha ura3/ura3 leu2/leu2 his3/his3 trp1/trp1 ho/ho |
| | pdc1Δ:[P_{ScPDC1}:25ScCOX4-MTS:BsalsS:P_{ScTDH3}:LlkivD:ScHMI1- |
| | MTS:P_{ScADH1}:ScADH7:P_{ScFBA1}:ScURA3:P_{ScFBA1}:31COX4-MTS:EcilvCcoSc^{P2D1-A1-his6}: |
| | P_{ScTPI1}:ScILV3:T_{ScPDC1}]/PDC1 pdc6Δ::[P_{ScTDH3}:Nc |
| | Transhydrogenase:P_{ScTEF1}:hph:]/PDC6 |
| SCP1M | S. cerevisiae MAT-a/alpha ura3/ura3 leu2/leu2 his3/his3 trp1/trp1 ho/ho |
| | pdc1Δ::[P_{ScPDC1}:25ScCOX4-MTS:BsalsS:P_{ScTDH3}:LlkivD:ScHMI1- |
| | MTS:P_{ScADH1}:DmADH:P_{ScFBA1}:ScURA3:P_{ScFBA1}:ScILV5:P_{ScTPI1}:ScILV3:T_{ScPDC1}]/PDC1 |
| SCP1MB | S. cerevisiae MAT-a/alpha ura3/ura3 leu2/leu2 his3/his3 trp1/trp1 ho/ho |
| | pdc1Δ::[P_{ScPDC1}:25ScCOX4-MTS:BsalsS:P_{ScTDH3}:LlkivD:ScHMI1- |
| | MTS:P_{ScADH1}:ScADH7:P_{ScFBA1}:ScURA3:P_{ScFBA1}:SCILV5:P_{ScTPI1}:ScILV3:T_{ScPDC1}]/PDC1 |
| | pdc6Δ::[P_{ScTDH3}:ScPCK1:P_{ScADH1}:ScMDH2:P_{ScFBA1}:ScDIC1:P_{ScTPI1}:ScMAE1: |
| | P_{ScTEF1}:hph:T_{ScPDC6}]/PDC6 |
| SCP1MMB | S. cerevisiae MAT-a/alpha ura3/ura3 leu2/leu2 his3/his3 trp1/trp1 ho/ho |
| | pdc1Δ::[P_{ScPDC1}:25ScCOX4-MTS:BsalsS:P_{ScTDH3}:LlkivD:ScHMI1- |
| | MTS:P_{ScADH1}:DmADH:P_{ScFBA1}:ScURA3:P_{ScFBA1}:ScILV5:P_{ScTPI1}:ScILV3:T_{ScPDC1}]/PDC1 |
| | pdc6Δ::[P_{ScTDH3}:ScPCK1:P_{ScADH1}:ScMDH2:P_{ScFBA1}:ScDIC1:P_{ScTPI1}:ScMAE1: |
| | P_{ScTEF1}:hph:T_{ScPDC6}]/PDC6 |
| SCP1MTH | S. cerevisiae MAT-a/alpha ura3/ura3 leu2/leu2 his3/his3 trp1/trp1 ho/ho |
| | pdc1Δ::[P_{ScPDC1}:25ScCOX4-MTS:BsalsS:P_{ScTDH3}:LlkivD:ScHMI1- |
| | MTS:P_{ScADH1}:DmADH:P_{ScFBA1}:ScURA3:P_{ScFBA1}:ScILV5:P_{ScTPI1}:ScILV3:T_{ScPDC1}]/PDC1 |
| | pdc6Δ::[P_{ScTDH3}:Nc Transhydrogenase:P_{ScTEF1}:hph:]/PDC6 |
| SCP1N | S. cerevisiae MAT-a/alpha ura3/ura3 leu2/leu2 his3/his3 trp1/trp1 ho/ho |
| | pdc1Δ::[P_{PDC1}:25COX4-MTS:BsalsS:P_{TDH3}:LlkivD:ScHMI1- |
| | MTS:P_{ScADH1}:DmADH:P_{ScFBA1}:ScURA3:P_{ScFBA1}:31COX4-MTS:EcilvCcoSc^{P2D1-A1-his6}: |
| | P_{ScTPI1}:ILV3:T_{ScPDC1}]/PDC1 |
| SCP1TH | S. cerevisiae MAT-a/alpha ura3/ura3 leu2/leu2 his3/his3 trp1/trp1 ho/ho |
| | pdc1Δ::[P_{ScPDC1}:25ScCOX4-MTS:BsalsS:P_{ScTDH3}:LlkivD:ScHMI1- |
| | MTS:P_{ScADH1}:ScADH7:P_{ScFBA1}:ScURA3:P_{ScFBA1}:ScILV5:P_{ScTPI1}:ScILV3:T_{ScPDC1}]/PDC1 |
| | pdc6 Δ::[P_{ScTDH3}:Nc Transhydrogenase:P_{ScTEF1}:hph]/PDC6 |
| SCPA1 | S. cerevisiae MAT-a/alpha ura3/ura3 leu2/leu2 his3/his3 trp1/trp1 ho/ho |
| | pdc1Δ::[P_{ScPDC1}:25ScCOX4-MTS:BsalsS:P_{ScTDH3}:LlkivD:ScHMI1- |
| | MTS:P_{ScADH1}:ScADH3- |
| | MTS:ScADH7:P_{ScFBA1}:ScURA3:P_{ScFBA1}:ScILV5:P_{ScTPI1}:ScILV3:T_{ScPDC1}]/PDC1 |
| SCPA1MB | S. cerevisiae MAT-a/alpha ura3/ura3 leu2/leu2 his3/his3 trp1/trp1 ho/ho |
| | pdc1Δ::[P_{ScPDC1}:25ScCOX4-MTS:BsalsS:P_{ScTDH3}:LlkivD:ScHMI1- |
| | MTS:P_{ScADH}:ScADH3- |
| | MTS:ScADH7:P_{ScFBA1}:ScURA3:P_{ScFBA1}:ScILV5:P_{ScTPI1}:ScILV3:T_{ScPDC1}]/PDC1 |
| | pdc6 Δ::[P_{ScTDH3}:ScPCK1:P_{ScADH1}:ScMDH2:P_{ScFBA1}:ScDIC1:P_{ScTPI1}:ScMAE1: |
| | P_{ScTEF1}:hph:T_{ScPDC6}]/PDC6 |
| SCPA1N | S. cerevisiae MAT-a/alpha ura3/ura3 leu2/leu2 his3/his3 trp1/trp1 ho/ho |
| | pdc1Δ::[P_{PDC1}:25COX4-MTS:BsalsS:P_{TDH3}:LlkivD:ScHMI1-MTS: |
| | P_{ScADH1}:ScADH3-MTS:DmADH:P_{ScFBA1}:URA3: P_{ScFBA1}:31COX4- |
| | MTS:EcilvCcoSc^{P2D1-A1-his6}:P_{ScTPI1}:ILV3:T_{ScPDC1}]/PDC1 |
| SCPA1TH | S. cerevisiae MAT-a/alpha ura3/ura3 leu2/leu2 his3/his3 trp1/trp1 ho/ho |
| | pdc1Δ::[P_{ScPDC1}:25ScCOX4-MTS:BsalsS:P_{ScTDH3}:LlkivD:ScHMI1- |
| | MTS:P_{ScADH}:ScADH3- |
| | MTS:ScADH7:P_{ScFBA1}:ScURA3:P_{ScFBA1}:ScILV5:P_{ScTPI1}:ScILV3:T_{ScPDC1}]/PDC1 |
| | pdc6 Δ::[P_{ScTDH3}:Nc Transhydrogenase:P_{ScTEF1}:hph]/PDC6 |

| pGV No. | SEQ ID NO | Genotype |
|---|---|---|
| 1104 | | ScTRP1 2μ |
| 1315 | | P_{ScTEF2}:ScILV2ΔN:P_{ScTDH3}:ScILV6ΔN:T_{ScCYC1}, bla, pUC ori, HIS3, |
| | | 2μ |
| 1441 | | P_{ScTEF1}:MCS:T_{ScCYC1} ScHIS3 2μ pUC ori bla |
| 1503 | | P_{ScTEF1}:G418, bla, pUC ori, |
| 1590 | | P_{ScTEF1}:LlkivD2:P_{Sc}_{_{—}}_{TDH3}:ScADH7:URA3, PMB1, AP^{r} |
| 1730 | | P_{ScPDC}, ScTRP1, P_{ScCUP1-1}:BsalsS2::T_{Sc}_{_{—}}_{PDC1}, PMB1, AP^{r} |
| 1731 | | P_{ScPDC5},ScLEU, P_{ScTEF1}:EcilvDΔNcoKl:P_{ScTDH3}:EcilvCΔN: T_{ScPDC5} |
| | | PMB1, AP^{r} |
| 1733 | | P_{ScPDC6}, ScURA3 P_{ScTEF1}:LlkivD2:P_{ScTDH3}:ScADH7:T_{ScPDC6} PMB1, |
| | | AP^{r} |
| 1773 | 1 | P_{Sc}_{_{—}}_{PDC1}:BsalsS:P_{ScTDH3}:LlkivD:P_{ScADH1}:ScADH7:P_{ScFBA1}:5′ ScURA3, |
| | | pUC ori, kan^{R} |
| 1774 | 2 | 3′ ScURA3:P_{S}_{_{—}}_{FBA1}:EcilvCco:P_{ScTPI1}:EcilvDco:T_{ScPDC1}, pUC ori, |
| | | kan^{R} |
| 1799 | | KmURA3D, pUC ori, AP^{r} |
| 1810 | 3 | 3′ URA3:P_{ScFBA1}:ScILV5:P_{ScTPI1}:EcilvDco:T_{ScPDC1}, pUC ori, kan^{R} |
| 1811 | 4 | P_{Km}_{_{—}}_{PDC1}: BsalsS:P_{ScTDH3}:LlkivD:P_{ScADH1}:ScADH7:P_{ScFBA1}:5′ |
| | | ScURA3, pUC ori, kan^{R} |
| 1812 | 5 | 3′ ScURA3:P_{ScFBA}:EcilvCco:P_{ScTPI1}:EcilvDco:T_{KmPDC1}, pUC ori, |
| | | kan^{R} |
| 1816 | | P_{Sc}_{_{—}}_{PDC1}: BsalsS:T_{ScTDH3}:Llkivd::P_{ScADH1}:ScADH7:P_{ScFBA1}:URA3: |
| | | T_{ScPDC1}, pUC ori, kan^{R} |
| 1817 | 6 | 3′ ScURA3:P_{ScFB1}:ScILV5:P_{ScTPI1}:ScILV3:T_{ScPDC1}, pUC ori, kan^{R} |
| 1817N | 12 | 3′ ScURA3: P_{ScFBA1}:31COX4-MTS:EcilvCcoSc^{P2D1-A1-his6}: P_{ScTPI1}: |
| | | ScILV3: T_{ScPDC1}, pUC ori, kan^{R} |
| 1832 | 7 | 3′ ScURA3:P_{ScFBA}:ScILV5:P_{ScTPI1}:ScILV3:T_{KmPDC1}, pUC ori, kan^{R} |
| 1832N | 13 | 3′ ScURA3: P_{ScFBA1}:31COX4-MTS:EcilvCcoSc^{P2D1-A1-his6}: P_{ScTPI1}: |
| | | ScILV3: T_{KmPDC1}, pUC ori, kan^{R} |
| 1834 | 8 | P_{KmPDC1}:25ScCOX4-MTS:BsalsS:P_{ScTDH3}:LlkivD:ScHMI1- |
| | | MTS:P_{ScADH1}:ScADH7:P_{ScFBA}:5′ ScURA3, pUC ori, kan^{R} |
| 1834N | 14 | P_{KmPDC1}:25ScCOX4-MTS:BsalsS:P_{ScTDH3}:LlkivD:ScHMI1- |
| | | MTS:P_{ScADH1}:DmADH:P_{ScFBA1}:5′ ScURA3, pUC ori, kan^{R} |
| 1874 | | P_{ScPDC1}:25ScCOX4-MTS:BsalsS:P_{ScTDH3}:LlkivD:ScHMI1- |
| | | MTS:P_{ScADH1}:ScADH7:P_{ScFBA1}:ScURA3:T_{ScPDC1}, pUC ori, kan^{R} |
| 1875 | 92 | P_{ScPDC1}:31ScCOX4-MTS:BsalsS:P_{ScTDH3}:LlkivD:ScHMI1-MTS:P_{ScADH1}: |
| | | ScADH7: P_{ScFBA1}:ScURA3:T_{ScPDC1}, pUC ori, kan^{R} |
| 1876 | 97 | P_{ScPDC1}:25ScCOX4-MTS:BsalsS:P_{ScTDH3}ScARO10:ScHMI1-MTS: |
| | | P_{ScADH1}:ScADH7:P_{ScFBA1}:ScURA3:T_{ScPDC1}, pUC ori, kan^{R} |
| 1877 | | P_{ScPDC1}:31ScCOX4-MTS:BsalsS:P_{ScTDH3}:ScARO10:ScHMI1-MTS: |
| | | P_{ScADH1}:ScADH7: P_{ScFBA1}:ScURA3:T_{ScPDC1}, pUC ori, kan^{R} |
| 1878 | | P_{ScPDC1}:ScILV2:P_{ScTDH3}:Llkivd:ScHMI1-MTS:P_{ScADH1}:ScADH7: |
| | | P_{ScFBA1}:ScURA3:T_{ScPDC1}, pUC ori, kan^{R} |
| 1879 | | P_{ScPDC1}:ScILV2:P_{ScTDH3}:ScARO10::ScHMI1- |
| | | MTS:P_{ScADH1}:ScADH7:P_{ScFBA1}:ScURA3:T_{ScPDC}, pUC ori, kan^{R} |
| 1892 | | P_{ScPDC1}:ScILV2:P_{ScTDH3}:Llkivd:ScHMI1-MTS:P_{ScADH1}:P_{ScFBA1}: |
| | | ScURA3:T_{S}_{_{—}}_{PDC, pUC ori, kan}^{R} |
| 1909 | | P_{ScPDC1}:31ScCOX4-MTS:BsalsS:P_{ScTDH3}:LlkivD:ScHMI1- |
| | | MTS:P_{ScFBA1}:ScURA3:T_{ScPDC} pUC ori Kan^{R} |
| 1914 | | P_{TEF1}:Llkivd2:P_{TDH3}:DmADH PDC6 5′,3′ targeting homology |
| | | URA3 |
| 1936 | | P_{TEF1}:ScILV3ΔN P_{TDH3}:EcilvCco(Sc)^{Q110V} PDC5 5′,3′ targeting |
| | | homology LEU2 |
| 1990 | 94 | P_{Sc}_{_{—}}_{PDC1}:31ScCOX4- |
| | | MTS:BsalsS:P_{ScTDH3}:LlkivD2:P_{ScFBA1}:ScURA3:T_{ScPDC} pUC ori |
| | | Kan^{R} |
| 1999 | 93 | P_{ScTEF1}:ScBAT2:T_{ScCYC1} ScHIS3 2μ |
| 2015 | 95 | P_{Sc}_{_{—}}_{PDC1}:31ScCOX4-MTS:BsalsS:P_{Sc}_{_{—}}_{TDH3}:P_{Sc}_{_{—}}_{FBA1}:ScURA3: |
| | | T_{Sc}_{_{—}}_{PDC} pUC ori, Kan^{R} |
| 2030 | | P_{ScTEF1}:LlkivD2:P_{ScTDH3}:DmADH, pUC ori, kan^{R} |
| 2061 | | P_{KmPDC1} LlkivD2:P_{ScTDH3}DmADH:P_{Sc FBA1}ScURA3 (5′ fragment), |
| | | pUC ori, kan^{R} |
| 2062 | | 3′ fragment of ScURA3: P_{ScFBA1}31ScCOX4-MTS:BsalsS:T_{KmPDC1}, |
| | | pUC ori, kan^{R} |
| 2212 | 98 | P_{TDH3}:ScBAT1:T_{ScCYC1} ScTRP1 2μ |
| 7001 | 9 | P_{ScPDC1}:25ScCOX4-MTS:BsalsS:P_{ScTDH3}:LlkivD:ScHMI1- |
| | | MTS:P_{ScADH1}:ScADH7:P_{ScFBA1}:ScURA3 (5′ fragment), pUC ori, |
| | | kan^{R} |
| 7001N | 15 | P_{Km}_{_{—}}_{PDC1}:25ScCOX4-MTS:BsalsS:P_{ScTDH3}:LlkivD:ScHMI1- |
| | | MTS:P_{ScADH1}:DmADH:P_{ScFBA1}:ScURA3 (5′ fragment), pUC ori, |
| | | kan^{R} |
| 7101 | 10 | P_{Sc}_{_{—}}_{PDC1}:25ScCOX4-MTS:BsalsS:P_{ScTDH3}:LlkivD:ScHMI1- |
| | | MTS-P_{ScADH1}:ScADH3-MTS:ScADH7:P_{ScFBA}:Sc_URA3(5′ |
| | | fragment), pUC ori, kan^{R} |
| 7101N | 16 | P_{Sc}_{_{—}}_{PDC1}:25ScCOX4-MTS:BsalsS:P_{ScTDH3}:LlkivD:ScHMI1- |
| | | MTS:P_{ScADH1}:ScADH3-MTS:DmADH:P_{ScFBA}:ScURA3 (5′ |
| | | fragment), pUC ori, kan^{R} |
| 8000 | 18 | P_{ScTDH3}:ScPCK1:P_{ScADH1}:ScMDH2:P_{ScFBA1}:ScDIC1:P_{ScTPI1}: |
| | | ScMAE1:P_{ScTEF1}:hph:T_{ScPDC6}, pUC ori, kan^{R} |
| 9000 | 19 | P_{ScTDH3}:Nc Transhydrogenase:P_{ScTEF1}:hph:T_{ScPDC6}:P_{ScPDC6}, pUC ori, |
| | | kan^{R} |
| 9834 | 11 | P_{KmPDC1}:25ScCOX4-MTS:BsalsS:P_{ScTDH3}:LlkivD:ScHMI1- |
| | | MTS:P_{ScADH1}:ScADH3-MTS:ScADH7:P_{ScFBA1}:ScURA3 (5′ |
| | | fragment) pUC ori, kan^{R} |
| 9834N | 17 | P_{KmPDC1}:25ScCOX4-MTS:BsalsS:P_{ScTDH3}:LlkivD:ScHMI1- |
| | | MTS:P_{ScADH1}:ScADH3-MTS:DmADH:P_{ScFBA1}:ScURA3 (5′ |
| | | fragment), pUC ori, kan^{R} |

Table 3 outlines the primers sequences disclosed herein:

| GEVO No. | Sequence |
|---|---|
| 393 | ATGGAAGATGTTCACCGTGC (SEQ ID NO: 100) |
| 394 | CAACCACTGCAGCCAGCAGTTAAAGCACCAAC (SEQ ID NO: 163) |
| 395 | CTCACAGGATCCGACGCAATGCCATTACACTC (SEQ ID NO: 101) |
| 457 | CAGATCGTCGACATGACCTTGGCACCCCTAGAC (SEQ ID NO: 99) |
| 458 | GTTCCCGGATCCTCAGTTCAAATCAGTAACAACCCTTG (SEQ ID NO: 55) |
| 562 | TTAAGCGGATCTGCCTACTC (SEQ ID NO: 164) |
| 837 | ATCATTTGTAAACTGGAACAGC (SEQ ID NO: 165) |
| 1321 | AATCATATCGAACACGATGC (SEQ ID NO: 102) |
| 1322 | TCAGAAAGGATCTTCTGCTC (SEQ ID NO: 103) |
| 1323 | ATCGATATCGTGAAATACGC (SEQ ID NO: 104) |
| 1324 | AGCTGGTCTGGTGATTCTAC (SEQ ID NO: 105) |
| 1341 | TGCTGAAAGAGAAATTGTCC (SEQ ID NO: 106) |
| 1342 | TTTCTTGTTCGAAGTCCAAG (SEQ ID NO: 107) |
| 1364 | TTTTGCGGCCGCTTAGATGCCGGAGTCCCAGTGCTTG |
| | (SEQ ID NO: 54) |
| 1435 | GTTGGCATAGCGGAAACTTC (SEQ ID NO: 65) |
| 1436 | AAATGACGACGAGCCTGAAG (SEQ ID NO: 108) |
| 1437 | GACCTGACCATTTGATGGAG (SEQ ID NO: 109) |
| 1439 | CAATTGGCGAAGCAGAACAAG (SEQ ID NO: 110) |
| 1440 | ATCGTACATCTTCCAAGCATC (SEQ ID NO: 111) |
| 1441 | AATCGGAACCCTAAAGGGAG (SEQ ID NO: 112) |
| 1442 | AATGGGCAAGCTGTTTGCTG (SEQ ID NO: 113) |
| 1443 | TGCAGATGCAGATGTGAGAC (SEQ ID NO: 114) |
| 1566 | TCCCACCCAATCAAGGCCAACG (SEQ ID NO: 115) |
| 1567 | TCCACCTGGTGCCAATGAACCG (SEQ ID NO: 116) |
| 1587 | CGGCTGCCAGAACTCTACTAACTG (SEQ ID NO: 117) |
| 1588 | GCGACGTCTACTGGCAGGTTAAT (SEQ ID NO: 118) |
| 1595 | CAACCTGGTGATTTGGGGAAG (SEQ ID NO: 119) |
| 1597 | GAATGATGGCAGATTGGGCA (SEQ ID NO: 120) |
| 1598 | TATTGTGGGGCTGTCTCGAATG (SEQ ID NO: 121) |
| 1608 | GTCAACATGTCGACTGCAATTATTTGGTTTGGGT |
| | (SEQ ID NO: 56) |
| 1609 | GTGGTTAGGGATCCAATCGATCCAAAGAAGAGAG |
| | (SEQ ID NO: 57) |
| 1610 | TGCAGAGTCGAATTCAAGCTTGTGTATATGCCAAA |
| | (SEQ ID NO: 58) |
| 1615 | CAACTCGCGGCCGCGGATCCTAGGTTATTGGTTTTCTGGTCTCAAC |
| | (SEQ ID NO: 59) |
| 1616 | CGCCGACTCGAGATGTTGAGAACTCAAGCCGC (SEQ ID NO: 60) |
| 1617 | CGTTGAGTCGACATGGGCTTGTTAACGAAAGTTGC |
| | (SEQ ID NO: 61) |
| 1618 | GCCAACGGATCCTCAAGCATCTAAAACACAACCG |
| | (SEQ ID NO: 62) |
| 1633 | TCCGTCACTGGATTCAATGCCATC (SEQ ID NO: 122) |
| 1634 | TTCGCCAGGGAGCTGGTGAA (SEQ ID NO: 123) |
| 1652 | ATTTCTTTCCAGACTTGTTC (SEQ ID NO: 63) |
| 1653 | ATCTCCCCACTTCAGAAGTTCCTA (SEQ ID NO: 64) |
| 1658 | TAGGAACTTCTGAAGTGGGGAGATCTCACCAGTAAAACATACGCATACA |
| | CATAC (SEQ ID NO: 66) |
| 1661 | ATCCAAAATTTTTACGTAACTGATTGTATCGCTGCACATTATAACCATGT |
| | GTCACGGATTTGTTTTGTTCGGCG (SEQ ID NO: 69) |
| 1662 | ATCCAAAATTTTTACGTAACTGATTGTATCGCTGCACATTATAACCATGT |
| | GTCACTTTTTTATTTCTTTTAAGTGCCGC (SEQ ID NO: 70) |
| 1663 | AATCAGTTACGTAAAAATTTTGGATTTTATAGAGCATATTCTTCACTAAG |
| | AGGTTGTAAGAGCGTTTTCAGACGTATATAGGCTAGCTAAT |
| | (SEQ ID NO: 71) |
| 1664 | ATTAGCTAGCCTATATACGTCTGAAAACGCTCTTACAACCTCTTAGTGAA |
| | GAATATGCTCTATAAAATCCAAAATTTTTACGTAACTGATT |
| | (SEQ ID NO: 72) |
| 1665 | TACTCGAGATGCTTTCACTACGTCAATCTATAAGATTTTTCAAGCCAGCC |
| | ACAAGAACTTTGTGTAGCTCTAGATATCTGCTT (SEQ ID NO: 73) |
| 1666 | AAGCAGATATCTAGAGCTACACAAAGTTCTTGTGGCTGGCTTGAAAAATC |
| | TTATAGATTGACGTAGTGAAAGCATCTCGAGTA (SEQ ID NO: 74) |
| 1667 | ACTCGAGATGCTTTCACTACGTCAATCTATAAGATTTTTCAAGCCAGCCA |
| | CAAGAACTTTGTGTAGCTCTAGATATCTGCTTCAGCAAAAACCCGTGGTG |
| | (SEQ ID NO: 75) |
| 1668 | CACCACGGGTTTTTGCTGAAGCAGATATCTAGAGCTACACAAAGTTCTTG |
| | TGGCTGGCTTGAAAAATCTTATAGATTGACGTAGTGAAAGCATCTCGAGT |
| | (SEQ ID NO: 76) |
| 1671 | CACATAGAGCAAGCAAGCAG (SEQ ID NO: 124) |
| 1672 | CGTAAGCAGCGTTCAATTCG (SEQ ID NO: 125) |
| 1673 | CGAATTGAACGCTGCTTACGGTGAATTCGAGCTCATAGCTTC |
| | (SEQ ID NO: 126) |
| 1674 | CATTTGGACACCTGGGAAAGGCTTACGCAATGCCATTACAC |
| | (SEQ ID NO: 127) |
| 1675 | CTTTCCCAGGTGTCCAAATG (SEQ ID NO: 128) |
| 1676 | GAGCTTGCTTGACCAAGTTG (SEQ ID NO: 129) |
| 1678 | CTGGCATTGTGTCTGGATTG (SEQ ID NO: 130) |
| 1679 | GAGATTAAATCGCGCTAGCTTAATTCTGCTGACCACATCTTC |
| | (SEQ ID NO: 131) |
| 1680 | CAGAATTAAGCTAGCGCGATTTAATCTCTAATTATTAGT |
| | (SEQ ID NO: 132) |
| 1681 | TTTGTGTAGCTCTAGATATCTGCTTATGTTGACTAAAGCTACAAAAGAGC |
| | (SEQ ID NO: 77) |
| 1682 | TCTGCTTCAGCAAAAACCCGTGGTGATGTTGACTAAAGCTACAAAAGAGC |
| | (SEQ ID NO: 78) |
| 1683 | TACTCGAGATGCTTTCACTACG (SEQ ID NO: 79) |
| 1684 | ATTAGCTAGCCTATATACGTCTGA (SEQ ID NO: 80) |
| 1685 | ATTACTCGAGATGATCAGACAATCTACGCTAA (SEQ ID NO: 81) |
| 1686 | CTGAAAAAGCGTGTTTTTTATGGATCCTCAGTGCTTACCGCCTGTAC |
| | (SEQ ID NO: 133) |
| 1687 | GTACAGGCGGTAAGCACTGAGGATCCATAAAAAACACGCTTTTTCAG |
| | (SEQ ID NO: 134) |
| 1688 | TTCAATTGTAACAGGTGCCATAAGCTTTTTGTTTGTTTATGTGTG |
| | (SEQ ID NO: 135) |
| 1689 | CACACATAAACAAACAAAAAGCTTATGGCACCTGTTACAATTGAA |
| | (SEQ ID NO: 136) |
| 1690 | ATAAAAAACACGCTTTTTCAG (SEQ ID NO: 137) |
| 1691 | TTTGTTTGTTTATGTGTGTTTATTC (SEQ ID NO: 138) |
| 1738 | GCCTTCTCGTCAACCAAGA (SEQ ID NO: 139) |
| 1739 | CGTGAATGTAAGCGTGACATAAC (SEQ ID NO: 140) |
| 1740 | AAATCATATGTGCTACCATGGTGCGTTG (SEQ ID NO: 141) |
| 1741 | TCTTGGTTGACGAGAAGGCG (SEQ ID NO: 142) |
| 2038 | CACATAAACAAACAAAAAGCTTATGTATACTGTTGGTGATTA |
| | (SEQ ID NO: 143) |
| 2039 | CAGTATTGTTATGCGGCCGCTTAGGATTTATTCTGTTCAG |
| | (SEQ ID NO: 144) |
| 2105 | ACTAGACTCGAGATGCTTTCACTACGTCAATCTA (SEQ ID NO: 145) |
| 2106 | ATCTGAGGATCCTTATAAGGCTTTGGTCTTCAT (SEQ ID NO: 146) |
| 2305 | TTGATTGGATCCATGTTGCAGAGACATTCCT (SEQ ID NO: 147) |
| 2323 | ATTGATGCGGCCGCTTAGTTCAAGTCGGCAACA (SEQ ID NO: 148) |
| ADH3MTSF | AATTCATATGTTGAGAACGTCAACATTGTTCACCAGGCGTGTCCAACCAA |
| | GCCTATTTTCTAGAAACATTCTTAGATTGCAATCCACAGCTGCATTATA |
| | (SEQ ID NO: 82) |
| ADH3MTSR | TATAATGCAGCTGTGGATTGCAATCTAAGAATGTTTCTAGAAAATAGGCT |
| | TGGTTGGACACGCCTGGTGAACAATGTTGACGTTCTCAACATATGAATT |
| | (SEQ ID NO: 83) |
| ADH7F | ATCCACAGCTGCATTATATCCAGAGAAATTCCAAGGC (SEQ ID NO: 84) |
| ADH7R | GCTCCCATGGCCTTAGCTAG (SEQ ID NO: 85) |
| ADH37F | AATTCATATGTTGAGAACGTCAACA (SEQ ID NO: 86) |
| DMADH3MTSF | AATTCATATGTTGAGAACGTCAACATTGTTCACCAGGCGTGTCCAACCAA |
| | GCCTATTTTCTAGAAACATTCTTAGATTGCAATCCACAGCTGCATCGTT |
| | (SEQ ID NO: 87) |
| DMADH3MTSR | AACGATGCAGCTGTGGATTGCAATCTAAGAATGTTTCTAGAAAATAGGCT |
| | TGGTTGGACACGCCTGGTGAACAATGTTGACGTTCTCAACATATGAATT |
| | (SEQ ID NO: 88) |
| DMADH3R | AATTGCGGCCGCTTAGATGCCGGAGTCCCAG (SEQ ID NO: 89) |
| DMADH3F | ATCCACAGCTGCATCGTTTACTTTGACCAACAAG (SEQ ID NO: 90) |
| DMADHF | TTTTCATATGTCGTTTACTTTGACCAACAAG (SEQ ID NO: 91) |

### Example 1

### Mitochondrial Production of Isobutanol in K. marxianus with ALS, KARI, DHAD, and KIVD Targeted to the Mitochondria, Wherein PDC is Deleted

[0312] This example illustrates how mitochondrial isobutanol production is achieved in PDC-minus yeast using four pathway enzymes targeted to the mitochondria. With these modifications, strain A will generally exhibit higher isobutanol productivity, titer, and/or yield as compared to the parent strain GEVO1947, while at the same time, exhibiting reduced ethanol production.

[0313] To accomplish this, GEVO1947 is first transformed with linear DNA from pGV1832 and additional linear DNA from pGV1834 resulting in strain A. This combination of linear DNA contains genes coding for all five isobutanol pathway enzymes, the K. marxianus PDC1 promoter (P_{KmPDC1}) and terminator (T_{KmPDC1}) sequences for homologous integration into the PDC1 locus and the uracil marker for selection. This homologous replacement event results in the simultaneous integration of the isobutanol pathway along with deletion of the PDC1 coding sequence. Adh7p is targeted to its native compartment, the cytosol. All other pathway enzymes are targeted to the mitochondria. Pathway enzymes that are not natively localized to the mitochondria are fused to mitochondrial targeting sequences that direct them to the mitochondria. The transformed cells are plated onto selective medium without uracil and incubated at 30° C. for 3 days. After 3 days colonies are patched onto selective plates and these patches are used for colony PCR and RT PCR to verify correct integration and transcription of the pathway genes. Three verified clones from each transformation are used to inoculate 3 mL overnight cultures in YPD. As a control GEVO1947 is used. The overnight cultures are used to inoculate 100 mL YPD cultures in 1 L shake flasks. These cultures are harvested at an OD600 of 0.6-0.8. The cells are resuspended in 50 mL fresh YPD medium and the cultures are incubated in 250 mL shake flasks at 30° C., 250 rpm. 2 mL samples are taken at 24 and 48 hours after inoculation. The fermentation is ended after 48 hours. Samples are processed and analyzed by HPLC and GC.

### Example 2

### Mitochondrial Production of Isobutanol in K. Marxianus with all Pathway Enzymes Targeted to the Mitochondria, Wherein PDC is Deleted

[0314] This example illustrates how mitochondrial production of isobutanol is achieved in PDC-minus yeast with five pathway enzymes targeted to the mitochondria. With these modifications, strain A1 will generally exhibit higher isobutanol productivity, titer, and/or yield as compared to the parent strain GEVO1947, while at the same time, exhibiting reduced ethanol production.

[0315] To accomplish this, GEVO1947 first is transformed with linear DNA from pGV1832 and additional linear DNA from pGV9834 resulting in strain A1. The combination of linear DNA contains genes coding for all five isobutanol pathway enzymes, the K. marxianus PDC1 promoter and terminator sequences for homologous integration into the PDC1 locus and the uracil marker for selection. This homologous replacement event results in the simultaneous integration of the isobutanol pathway along with the deletion of the PDC1 coding sequence. All pathway enzymes are targeted to the mitochondria. Pathway enzymes that are not natively localized to the mitochondria are fused to mitochondrial targeting sequences that direct them to the mitochondria. The transformed cells are plated onto selective medium without uracil and incubated at 30° C. for 3 days. After 3 days colonies are patched onto selective plates and these patches are used for colony PCR and RT PCR to verify correct integration and transcription of the pathway genes. Three verified clones from each transformation are used to inoculate 3 mL overnight cultures in YPD. As a control GEVO1947 is used. These cultures are used to inoculate 100 mL YPD cultures in 1 L shake flasks. These cultures are harvested at an OD600 of 0.6-0.8. The cells are resuspended in 50 mL fresh YPD medium and the cultures are incubated in 250 mL shake flasks at 30° C., 250 rpm. 2 mL samples are taken at 24 and 48 hours after inoculation. The fermentation is ended after 48 hours. Samples are processed and analyzed by HPLC and GC.

### Example 3

### Mitochondrial Production of Isobutanol in K. Marxianus with all Pathway Enzymes Targeted to the Mitochondria

[0316] This example illustrates how mitochondrial production of isobutanol is achieved in yeast with five pathway enzymes targeted to the mitochondria. With these modifications, strain A1P will generally exhibit higher isobutanol productivity, titer, and/or yield as compared to the parent strain GEVO1947.

[0317] To accomplish this, GEVO1947 is first transformed with linear DNA from pGV1817 and additional linear DNA from pGV7101 resulting in strain A1P. This combination of linear DNA contains genes coding for all five isobutanol pathway enzymes, and the uracil marker for selection. The transformation leads to random (non targeted) insertion of the isobutanol pathway into the K. marxianus genome. All pathway enzymes are targeted to the mitochondria. Pathway enzymes that are not natively localized to the mitochondria are fused to mitochondrial targeting sequences that direct them to the mitochondria. The transformed cells are plated onto selective medium without uracil and incubated at 30° C. for 3 days. After 3 days colonies are patched onto selective plates and these patches are used for colony PCR and RT-PCR to verify correct integration and transcription of the pathway genes. Three verified clones from each transformation are used to inoculate 3 mL overnight cultures in YPD. As a control GEVO1947 is used. These cultures are used to inoculate 100 mL YPD cultures in 1 L shake flasks. These cultures are harvested at an OD600 of 0.6-0.8. The cells are resuspended in 50 mL fresh YPD medium and the cultures are incubated in 250 mL shake flasks at 30° C., 250 rpm. 2 mL samples are taken at 24 and 48 hours after inoculation. The fermentation is ended after 48 hours. Samples are processed and analyzed by HPLC and GC.

### Example 4

### Mitochondrial Production of Isobutanol in S. cerevisiae with all Pathway Enzymes Targeted to the Mitochondria

[0318] This example illustrates how mitochondrial production of isobutanol is achieved in yeast with five pathway enzymes targeted to the mitochondria. With these modifications, strain SCPA1 will generally exhibit higher isobutanol productivity, titer, and/or yield as compared to the parent strain GEVO1186.

[0319] To accomplish this, GEVO1186, a diploid CEN.PK strain, is first transformed with linear DNA from pGV1817 and additional linear DNA from either pGV7101 resulting in strain SCPA1. Each combination of linear DNA contains genes coding for all five isobutanol pathway enzymes, the S. cerevisiae PDC1 promoter and terminator sequences for homologous integration into the PDC1 locus and the uracil marker for selection. This homologous replacement event results in the simultaneous integration of the isobutanol pathway along with the deletion of the PDC1 coding sequence. All pathway enzymes are targeted to the mitochondria. Isobutanol pathway enzymes that are not natively localized to the mitochondria are fused to mitochondrial targeting sequences that direct them to the mitochondria. The transformed cells are plated onto selective medium without uracil and incubated at 30° C. for 3-4 days. After 3-4 days colonies are patched onto selective plates and these patches are used for colony PCR and RT-PCR to verify correct integration and transcription of the pathway genes. Three verified clones from each transformation are used to inoculate 3 mL overnight cultures in YPD. As a control GEVO1186 is used. These overnight cultures are used to inoculate 100 mL YPD cultures in 1 L shake flasks. The cultures are harvested at an OD600 of 0.6-0.8. The cells are resuspended in 50 mL fresh YPD medium and the cultures are incubated in 250 mL shake flasks at 30° C., 250 rpm. 2 mL samples are taken at 24 and 48 hours after inoculation. The fermentation is ended after 48 hours. Samples are processed and analyzed by HPLC and GC.

### Example 5

### Mitochondrial Production of Isobutanol in a PDC-Minus S. Cerevisiae with all Pathway Enzymes Targeted to the Mitochondria

[0320] This example illustrates how mitochondrial production of isobutanol is achieved in PDC-minus yeast with five pathway enzymes targeted to the mitochondria. With these modifications, strain SCA1 will generally exhibit higher isobutanol productivity, titer, and/or yield as compared to the parent strain GEVO7777, while at the same time, exhibiting reduced ethanol production.

[0321] To accomplish this, GEVO7777, a haploid CEN.PK strain deleted for PDC5 and PDC6, is first transformed with linear DNA from pGV1817 and additional linear DNA from pGV7101 resulting in strain SCA1. The combination of linear DNA contains genes coding for all five isobutanol pathway enzymes, the S. cerevisiae PDC1 promoter and terminator sequences for homologous integration into the PDC1 locus and the uracil marker for selection. This homologous replacement event results in the simultaneous integration of the isobutanol pathway along with the deletion of the PDC1 coding sequence. All pathway enzymes are targeted to the mitochondria. Pathway enzymes that are not natively localized to the mitochondria are fused to mitochondrial targeting sequences that direct them to the mitochondria. The transformed cells are plated onto selective medium using ethanol as carbon source and lacking uracil and incubated at 30° C. for 3-4 days. After 3-4 days colonies are patched onto selective plates and these patches are used for colony PCR and RT-PCR to verify correct integration and transcription of the pathway genes. Three verified clones from each transformation are used to inoculate 3 mL overnight cultures in YPEthanol. As a control GEVO7777 is used. These overnight cultures are used to inoculate 100 mL YPEthanol cultures in 1 L shake flasks. The cultures are harvested at an OD600 of 0.6-0.8. The cells are resuspended in 50 mL fresh YPD medium and the cultures are incubated in 250 mL shake flasks at 30° C., 250 rpm. 2 mL samples are taken at 24 and 48 hours after inoculation. The fermentation is ended after 48 hours. Samples are processed and analyzed by HPLC and GC.

### Example 6

### Mitochondrial Production of Isobutanol in C2-Independent PDC-Minus S. cerevisiae with ALS, KARI, DHAD, and KIVD Targeted to the Mitochondria

[0322] This example illustrates how mitochondrial production of isobutanol is achieved in C2-independent PDC-minus yeast with four pathway enzymes targeted to the mitochondria. With these modifications, strain c2i-SC1 will generally exhibit higher isobutanol productivity, titer, and/or yield as compared to the parent strain GEVO1863.

[0323] S. cerevisiae which is deleted for all PDC genes (PDC1, PDC5 and PDC6) is dependent on C2-carbons such as ethanol or acetate for growth. Such a strain can be evolved to grow on glucose and hence be C2-independent (van Maris, A., et al., Applied and Environmental Microbiology, 2004, 70(1):159-166). GEVO1863 is a PDC minus strain that has been evolved to grow on glucose. GEVO1863 is transformed with linear DNA from pGV1817 and additional linear DNA from pGV7001 resulting in strain c2i-SC1. The combination of linear DNA contains genes coding for all five isobutanol pathway enzymes, the S. cerevisiae PDC1 promoter and terminator sequences for homologous integration into the PDC1 locus and the uracil marker for selection. The homologous replacement event replaces the pdc1::ble allele while simultaneously integrating the isobutanol pathway. Adh7p is targeted to its native compartment, the cytosol. All other pathway enzymes are targeted to the mitochondria. Pathway enzymes that are not natively localized to the mitochondria are fused to mitochondrial targeting sequences that direct them to the mitochondria. The transformed cells are plated onto selective medium and lacking uracil and incubated at 30° C. for 3-4 days. After 3-4 days colonies are patched onto selective plates and these patches are used for colony PCR and RT PCR to verify correct integration and transcription of the pathway genes. Three verified clones from each transformation are used to inoculate 3 mL overnight cultures in YPD. As a control GEVO1863 is used. These overnight cultures are used to inoculate 100 mL YPD cultures in 1 L shake flasks. The cultures are harvested at an OD600 of 0.6-0.8. The cells are resuspended in 50 mL fresh YPD medium and the cultures are incubated in 250 mL shake flasks at 30° C., 250 rpm. 2 mL samples are taken at 24 and 48 hours after inoculation. The fermentation is ended after 48 hours. Samples are processed and analyzed by HPLC and GC.

### Example 7

### Mitochondrial Production of Isobutanol in C2-Independent PDC-Minus S. Cerevisiae with all Pathway Enzymes Targeted to the Mitochondria

[0324] This example illustrates how mitochondrial production of isobutanol is achieved in C2-independent PDC-minus yeast with five pathway enzymes targeted to the mitochondria. With these modifications, strain c2i-SCA1 will generally exhibit higher isobutanol productivity, titer, and/or yield as compared to the parent strain GEVO1863.

[0325] S. cerevisiae which is deleted for all PDC genes (PDC1, PDC5 and PDC6) is dependent on C2-carbons such as ethanol or acetate for growth. Such a strain can be evolved to grow on glucose and hence be C2-independent (van Maris, A., et al., Applied and Environmental Microbiology, 2004, 70(1):159-166). GEVO1863 is a PDC minus strain that has been evolved for growth on glucose. GEVO1863 is transformed with linear DNA from pGV1817 and additional linear DNA from pGV7101 resulting in strain c2i-SCA1. Each combination of linear DNA contains genes coding for all five isobutanol pathway enzymes, the S. cerevisiae PDC1 promoter and terminator sequences for homologous integration into the PDC1 locus and the uracil marker for selection. This homologous replacement event simultaneous integrates the isobutanol pathway along with replacing the pdc1::ble allele. All pathway enzymes are targeted to the mitochondria. Pathway enzymes that are not natively localized to the mitochondria are fused to mitochondrial targeting sequences that direct them to the mitochondria. The transformed cells are plated onto selective medium lacking uracil and incubated at 30° C. for 3-4 days. After 3-4 days colonies are patched onto selective plates and these patches are used for colony PCR and RT-PCR to verify correct integration and transcription of the pathway genes. Three verified clones from each transformation are used to inoculate 3 mL overnight cultures in YPD. As a control GEVO1863 is used. These overnight cultures are used to inoculate 100 mL YPD cultures in 1 L shake flasks. The cultures are harvested at an OD600 of 0.6-0.8. The cells are resuspended in 50 mL fresh YPD medium and the cultures are incubated in 250 mL shake flasks at 30° C., 250 rpm. 2 mL samples are taken at 24 and 48 hours after inoculation. The fermentation is ended after 48 hours. Samples are processed and analyzed by HPLC and GC.

### Example 8

### Mitochondrial Production of Isobutanol in K. Marxianus with Cofactor Usage Balanced by NADH Dependent Kari and ADH, Wherein ALS, KARI, DHAD, and KIVD are Targeted to the Mitochondria

[0326] This example illustrates how mitochondrial production of isobutanol in yeast possessing NADH dependent KARI and ADH enzymes. With these modifications, strain AN will generally exhibit higher isobutanol productivity, titer, and/or yield as compared to strain A and the parent strain GEVO1947, while at the same time, exhibiting reduced ethanol production.

[0327] As disclosed herein, one approach to balance the cofactor usage between glycolysis and the isobutanol pathway is the use of NADH dependent KARI and ADH. To accomplish this, the mitochondrially targeted NADH dependent KARI is cloned into pGV1832 replacing ScILV5 to generate pGV1832N. The NADH dependent ADH DmADH is cloned into pGV1834 replacing ScADH7 to generate pGV1834N.

[0328] GEVO1947 is then transformed with linear DNA from pGV1832N and from pGV1834N resulting in strain AN. The combination of linear DNA contains genes coding for all five isobutanol pathway enzymes, the K. marxianus PDC1 promoter and terminator sequences for homologous integration into the PDC1 locus and the uracil marker for selection. This homologous replacement event results in the simultaneous integration of the isobutanol pathway along with the deletion of the PDC1 coding sequence. The NADH dependent ADH is not targeted to the mitochondria. All other pathway enzymes are targeted to the mitochondria. Pathway enzymes that are not natively localized to the mitochondria are fused to mitochondrial targeting sequences that direct them to the mitochondria. The transformed cells are plated onto selective medium without uracil and incubated at 30° C. for 3 days. After 3 days colonies are patched onto selective plates and these patches are used for colony PCR and RT-PCR to verify correct integration and transcription of the pathway genes. Three verified clones from each transformation are used to inoculate 3 mL overnight cultures in YPD. As controls, the parental strain GEVO1947 and strain A which contains the NADPH dependent isobutanol pathway, are used. These cultures are used to inoculate 100 mL cultures in 1 L shake flasks. These cultures are harvested at an OD600 of 0.6-0.8. The cells are resuspended in 50 mL fresh YPD medium and the cultures are incubated in 250 mL shake flasks at 30° C., 250 rpm. 2 mL samples are taken at 24 and 48 hours after inoculation. The fermentation is ended after 48 hours. Samples are processed and analyzed by HPLC and GC.

### Example 9

### Mitochondrial Production of Isobutanol in S. Cerevisiae with Cofactor Usage Balanced by NADH Dependent KARI and ADH, Wherein ALS, KARI, DHAD, and KIVD are Targeted to the Mitochondria

[0329] This example illustrates how mitochondrial production of isobutanol is achieved in yeast possessing NADH dependent KARI and ADH enzymes. With these modifications, strain SCP1N will generally exhibit higher isobutanol productivity, titer, and/or yield as compared to strain SCP1 and the parent strain GEVO1186.

[0330] As disclosed herein, one approach to balance the cofactor usage between glycolysis and the isobutanol pathway is the use of NADH dependent KARI and ADH. To accomplish this, the mitochondrially targeted NADH dependent KARI is cloned into pGV1817 replacing ScILV5 to generate pGV1817N. The NADH dependent ADH DmADH is cloned into pGV7001 replacing ScADH7 to generate pGV7001N.

[0331] GEVO1186, a diploid CEN.PK strain is then transformed with linear DNA from pGV1817N and from pGV7001N resulting in strain SCP1N. This combination of linear DNA contains genes coding for all five isobutanol pathway enzymes, the S. cerevisiae PDC1 promoter and terminator sequences for homologous integration into the PDC1 locus and the uracil marker for selection. This homologous replacement event results in the simultaneous integration of the isobutanol pathway along with the deletion of the PDC1 coding sequence. The NADH dependent ADH is not targeted to the mitochondria. All other pathway enzymes are targeted to the mitochondria. Pathway enzymes that are not natively localized to the mitochondria are fused to mitochondrial targeting sequences that direct them to the mitochondria. The transformed cells are plated onto selective medium without uracil and incubated at 30° C. for 3 days. After 3 days colonies are patched onto selective plates and these patches are used for colony PCR and RT-PCR to verify correct integration and transcription of the pathway genes. Three verified clones from each transformation are used to inoculate 3 mL overnight cultures in YPD. As controls parental strain GEVO1186 and the strain SCP1, which contains the imbalanced pathway, are used. These overnight cultures are used to inoculate 100 mL cultures in 1 L shake flasks. The cultures are harvested at an OD600 of 0.6-0.8. The cells are resuspended in 50 mL fresh YPD medium and the cultures are incubated in 250 mL shake flasks at 30° C., 250 rpm. 2 mL samples are taken at 24 and 48 hours after inoculation. The fermentation is ended after 48 hours. Samples are processed and analyzed by HPLC and GC.

### Example 10

### Mitochondrial Production of Isobutanol in a PDC-Minus S. cerevisiae with Cofactor Usage Balanced by NADH Dependent KARI and ADH, Wherein ALS, KARI, DHAD, and KIVD are Targeted to the Mitochondria

[0332] This example illustrates how mitochondrial production of isobutanol is achieved in PDC-minus yeast possessing NADH dependent KARI and ADH enzymes. With these modifications, strain SC1N will generally exhibit higher isobutanol productivity, titer, and/or yield as compared to strain SC1 and the parent strain GEVO7777, while at the same time, exhibiting reduced ethanol production.

[0333] As disclosed herein, one approach to balance the cofactor usage between glycolysis and the isobutanol pathway is the use of NADH dependent KARI and ADH. To accomplish this, a mitochondrially targeted NADH dependent KARI is cloned into pGV1817 replacing ILV5 to generate pGV1817N. A NADH dependent ADH is cloned into pGV7001 replacing ADH7 to generate pGV7001N.

[0334] GEVO7777, a haploid CEN.PK strain deleted for PDC5 and PDC6, is then transformed with linear DNA from pGV1817N and from pGV7001N resulting in strain SC1N. This combination of linear DNA contains genes coding for all five isobutanol pathway enzymes, the S. cerevisiae PDC1 promoter and terminator sequences for homologous integration into the PDC1 locus and the uracil marker for selection. The homologous replacement event results in the simultaneous integration of the isobutanol pathway along with the deletion of the PDC1 coding sequence. The NADH-dependent ADH is not targeted to the mitochondria. All other pathway enzymes are targeted to the mitochondria. Pathway enzymes that are not natively localized to the mitochondria are fused to mitochondrial targeting sequences that direct them to the mitochondria. The transformed cells are plated onto selective medium using ethanol as carbon source and lacking uracil and incubated at 30° C. for 3-4 days. After 3-4 days colonies are patched onto selective plates and these patches are used for colony PCR and RT-PCR to verify correct integration and transcription of the pathway genes. Three verified clones from each transformation are used to inoculate 3 mL overnight cultures in YPEthanol. As controls the parental strain GEVO7777 and the strain SC1, containing the imbalanced pathway, are used. These overnight cultures are used to inoculate 100 mL cultures in 1 L shake flasks. The cultures are harvested at an OD600 of 0.6-0.8. The cells are resuspended in 50 mL fresh YPD medium and the cultures are incubated in 250 mL shake flasks at 30° C., 250 rpm. 2 mL samples are taken at 24 and 48 hours after inoculation. The fermentation is ended after 48 hours. Samples are processed and analyzed by HPLC and GC.

### Example 11

### Mitochondrial Production of Isobutanol in C2-Independent PDC-Minus S. cerevisiae with Cofactor Usage Balanced by NADH Dependent KARI and ADH, Wherein ALS, KARI, DHAD, and KIVD are Targeted to the Mitochondria

[0335] This example illustrates how mitochondrial production of isobutanol is achieved in C2-independent PDC-minus yeast possessing NADH dependent KARI and ADH enzymes. With these modifications, strain c2i-SC1N will generally exhibit higher isobutanol productivity, titer, and/or yield as compared to strain SC1 and the parent strain GEVO1863.

[0336] As disclosed herein, one approach to balance the cofactor usage between glycolysis and the isobutanol pathway is the use of NADH-dependent KARI and ADH. To accomplish this, the mitochondrially targeted NADH-dependent KARI is cloned into pGV1817 replacing ILV5 to generate pGV1817N. The NADH dependent ADH is cloned into pGV7001 replacing ADH7 to generate pGV7001N.

[0337] S. cerevisiae which is deleted for all PDC genes (PDC1, PDC5 and PDC6) are dependent on C2-carbons such as ethanol or acetate for growth. Such a strain can be evolved to grow on glucose and hence be C2-independent (van Maris, A., et al., Applied and Environmental Microbiology, 2004, 70(1):159-166). GEVO1863 is a PDC-minus strain that has been evolved to grow on glucose. GEVO1863 is transformed with linear DNA from pGV1817N and from pGV7001N resulting in strain c2i-SC1N. This combination of linear DNA contains genes coding for all five isobutanol pathway enzymes, the S. cerevisiae PDC1 promoter and terminator sequences for homologous integration into the PDC1 locus and the uracil marker for selection. The homologous replacement event replaces the pdc1::ble allele. The NADH dependent ADH is not targeted to the mitochondria. All other pathway enzymes are targeted to the mitochondria. Pathway enzymes that are not natively localized to the mitochondria are fused to mitochondrial targeting sequences that direct them to the mitochondria. The transformed cells are plated onto selective medium lacking uracil and incubated at 30° C. for 3-4 days. After 3-4 days colonies are patched onto selective plates and these patches are used for colony PCR and RT-PCR to verify correct integration and transcription of the pathway genes. Three verified clones from each transformation are used to inoculate 3 mL overnight cultures in YPD. As a control the parental strain, GEVO1863 and the strain c2i-SC1 containing the imbalanced pathway, are used. These overnight cultures are used to inoculate 100 mL YPD cultures in 1 L shake flasks. The cultures are harvested at an OD600 of 0.6-0.8. The cells are resuspended in 50 mL fresh YPD medium and the cultures are incubated in 250 mL shake flasks at 30° C., 250 rpm. 2 mL samples are taken at 24 and 48 hours after inoculation. The fermentation is ended after 48 hours. Samples are processed and analyzed by HPLC and GC.

### Example 12

### Mitochondrial Production of Isobutanol in K. Marxianus with Cofactor Usage Partially Balanced by NADH Dependent ADH, Wherein ALS, KARI, DHAD, and KIVD are Targeted to the Mitochondria

[0338] This example illustrates how mitochondrial production is achieved in yeast with cofactor usage partially balanced by NADH dependent ADH, wherein ALS, KARI, DHAD, and KIVD are targeted to the mitochondria. With these modifications, strain AM will generally exhibit higher isobutanol productivity, titer, and/or yield as compared to strain A and the parent strain GEVO1947, while at the same time, exhibiting reduced ethanol production.

[0339] As disclosed herein, one approach to balance the cofactor usage between glycolysis and the isobutanol pathway is the use of NADH dependent KARI and ADH. To accomplish this, the NADH dependent ADH is cloned into pGV1834 replacing ADH7 to generate pGV1834N.

[0340] GEVO1947 is then transformed with linear DNA from pGV1832 and from pGV1834N resulting in strain AM. Each combination of linear DNA contains genes coding for all five isobutanol pathway enzymes, the K. marxianus PDC1 promoter and terminator sequences for homologous integration into the PDC1 locus and the uracil marker for selection. This homologous replacement event results in the simultaneous integration of the isobutanol pathway along with the deletion of the PDC1 coding sequence. The NADH dependent ADH is not targeted to the mitochondria. All other pathway enzymes are targeted to the mitochondria. Pathway enzymes that are not natively localized to the mitochondria are fused to mitochondrial targeting sequences that direct them to the mitochondria. The transformed cells are plated onto selective medium without uracil and incubated at 30° C. for 3 days. After 3 days colonies are patched onto selective plates and these patches are used for colony PCR and RT-PCR to verify correct integration and transcription of the pathway genes. Three verified clones from each transformation are used to inoculate 3 mL overnight cultures in YPD. As a control the parental strain, GEVO1947 and the strain A, containing the NADPH dependent isobutanol pathway, are used. These cultures are used to inoculate 100 mL cultures in 1 L shake flasks. These overnight cultures are harvested at an OD600 of 0.6-0.8. The cells are resuspended in 50 mL fresh YPD medium and the cultures are incubated in 250 mL shake flasks at 30° C., 250 rpm. 2 mL samples are taken at 24 and 48 hours after inoculation. The fermentation is ended after 48 hours. Samples are processed and analyzed by HPLC and GC.

### Example 13

### Mitochondrial Production of Isobutanol in K. Marxianus with Cofactor Usage Partially Balanced by NADH Dependent ADH, Wherein ALS, KARI, DHAD, and KIVD are Targeted to the Mitochondria

[0341] This example illustrates how mitochondrial production is achieved in yeast with cofactor usage partially balanced by NADH dependent ADH, wherein ALS, KARI, DHAD, and KIVD are targeted to the mitochondria. With these modifications, strain APM will generally exhibit higher isobutanol productivity, titer, and/or yield as compared to strain AP and the parent strain GEVO1947.

[0342] As disclosed herein, one approach to balance the cofactor usage between glycolysis and the isobutanol pathway is the use of NADH dependent KARI and ADH. To accomplish this, the NADH dependent ADH DmADH is cloned into pGV7001 replacing ScADH7 to generate pGV7001N.

[0343] GEVO1947 is then transformed with linear DNA from pGV1817 and from pGV7001N resulting in strain APM. This combination of linear DNA contains genes coding for all five isobutanol pathway enzymes, and the uracil marker for selection. The transformation leads to random (non-targeted) insertion of the isobutanol pathway into the K. marxianus genome. DmADH is not targeted to the mitochondria. All other pathway enzymes are targeted to the mitochondria. Pathway enzymes that are not natively localized to the mitochondria are fused to mitochondrial targeting sequences that direct them to the mitochondria. The transformed cells are plated onto selective medium without uracil and incubated at 30° C. for 3 days. After 3 days colonies are patched onto selective plates and these patches are used for colony PCR and RT-PCR to verify correct integration and transcription of the pathway genes. Three verified clones from each transformation are used to inoculate 3 mL overnight cultures in YPD. As a control GEVO1947 and the pathway containing the NADPH dependent isobutanol pathway, strain AP, are used. These cultures are used to inoculate 100 mL YPD cultures in 1 L shake flasks. These overnight cultures are harvested at an OD600 of 0.6-0.8. The cells are resuspended in 50 mL fresh YPD medium and the cultures are incubated in 250 mL shake flasks at 30° C., 250 rpm. 2 mL samples are taken at 24 and 48 hours after inoculation. The fermentation is ended after 48 hours. Samples are processed and analyzed by HPLC and GC.

### Example 14

### Mitochondrial Production of Isobutanol in S. Cerevisiae with Cofactor Usage Partially Balanced by NADH Dependent ADH, Wherein ALS, KARI, DHAD, and KIVD are Targeted to the Mitochondria

[0344] This example illustrates how mitochondrial production is achieved in yeast with cofactor usage partially balanced by NADH dependent ADH, wherein ALS, KARI, DHAD, and KIVD are targeted to the mitochondria. With these modifications, strain SCP1M will generally exhibit higher isobutanol productivity, titer, and/or yield as compared to strain SCP1 and the parent strain GEVO1186.

[0345] As disclosed herein, one approach to balance the cofactor usage between glycolysis and the isobutanol pathway is the use of NADH dependent KARI and ADH. To accomplish this, the NADH dependent ADH is cloned into pGV7001 replacing ADH7 to generate pGV7001N.

[0346] GEVO1186, a diploid CEN.PK strain, is then transformed with linear DNA from pGV1817 and from pGV7001N resulting in strain SCP1M. Each combination of linear DNA contains genes coding for all five isobutanol pathway enzymes, the S. cerevisiae PDC1 promoter and terminator sequences for homologous integration into the PDC1 locus and the uracil marker for selection. This homologous replacement event results in the simultaneous integration of the isobutanol pathway along with the deletion of the PDC1 coding sequence. The NADH dependent ADH is not targeted to the mitochondria. All other pathway enzymes are targeted to the mitochondria. Pathway enzymes that are not natively localized to the mitochondria are fused to mitochondrial targeting sequences that direct them to the mitochondria. The transformed cells are plated onto selective medium without uracil and incubated at 30° C. for 3 days. After 3 days colonies are patched onto selective plates and these patches are used for colony PCR and RT PCR to verify correct integration and transcription of the pathway genes. Three verified clones from each transformation are used to inoculate 3 mL overnight cultures in YPD. As controls the parental strain, GEVO1186, and the strain SCP1, containing the imbalanced pathway are used. These cultures are used to inoculate 100 mL cultures in 1 L shake flasks. These cultures are harvested at an OD600 of 0.6-0.8. The cells are resuspended in 50 mL fresh YPD medium and the cultures are incubated in 250 mL shake flasks at 30° C., 250 rpm. 2 mL samples are taken at 24 and 48 hours after inoculation. The fermentation is ended after 48 hours. Samples are processed and analyzed by HPLC and GC.

### Example 15

### Mitochondrial Production of Isobutanol in a PDC-Minus S. cerevisiae with Cofactor Usage Partially Balanced by NADH Dependent ADH, Wherein ALS, KARI, DHAD, and KIVD are Targeted to the Mitochondria

[0347] This example illustrates how mitochondrial production is achieved in yeast with cofactor usage partially balanced by NADH dependent ADH, wherein ALS, KARI, DHAD, and KIVD are targeted to the mitochondria. With these modifications, strain SC1M will generally exhibit higher isobutanol productivity, titer, and/or yield as compared to strain SC1 and the parent strain GEVO7777, while at the same time, exhibiting reduced ethanol production.

[0348] As disclosed herein, one approach to balance the cofactor usage between glycolysis and the isobutanol pathway is the use of NADH dependent KARI and ADH. To accomplish this, the NADH dependent ADH DmADH is cloned into pGV7001 replacing ADH7 to generate pGV7001N.

[0349] GEVO7777, a haploid S. cerevisiae strain in which is deleted for PDC5 and PDC6, is then transformed with linear DNA from pGV1817 and from pGV7001N resulting in strain SC1M. This combination of linear DNA contains genes coding for all five isobutanol pathway enzymes, the S. cerevisiae PDC1 promoter and terminator sequences for homologous integration into the PDC1 locus and the uracil marker for selection. This homologous replacement event results in the simultaneous insertion of the isobutanol pathway along with deletion of the PDC1 coding sequence. DmADH is not targeted to the mitochondria. All other pathway enzymes are targeted to the mitochondria. Pathway enzymes that are not natively localized to the mitochondria are fused to mitochondrial targeting sequences that direct them to the mitochondria. The transformed cells are plated onto selective medium using ethanol as carbon source and lacking uracil and incubated at 30° C. for 3-4 days. After 3-4 days colonies are patched onto selective plates and these patches are used for colony PCR and RT-PCR to verify correct integration and transcription of the pathway genes. Three verified clones from each transformation are used to inoculate 3 mL overnight cultures in YPEthanol. As controls the parental strain GEVO7777 and the strain SC1 containing the imbalanced pathway, are used. These overnight cultures are used to inoculate 100 mL cultures in 1 L YPEthanol shake flasks. The cultures are harvested at an OD600 of 0.6-0.8. The cells are resuspended in 50 mL fresh YPD medium and the cultures are incubated in 250 mL shake flasks at 30° C., 250 rpm. 2 mL samples are taken at 24 and 48 hours after inoculation. The fermentation is ended after 48 hours. Samples are processed and analyzed by HPLC and GC.

### Example 16

### Mitochondrial Production of Isobutanol in C2-Independent PDC-Minus S. cerevisiae with Cofactor Usage Partially Balanced by NADH Dependent ADH, Wherein ALS, KARI, DHAD, and KIVD are Targeted to the Mitochondria

[0350] This example illustrates how mitochondrial production is achieved in C2-independent PDC-minus yeast with cofactor usage partially balanced by NADH dependent ADH, wherein ALS, KARI, DHAD, and KIVD are targeted to the mitochondria. With these modifications, strain c2i-SC1M will generally exhibit higher isobutanol productivity, titer, and/or yield as compared to strain c2i-SC1 and the parent strain GEVO1863.

[0351] As disclosed herein, one approach to balance the cofactor usage between glycolysis and the isobutanol pathway is the use of NADH dependent KARI and ADH. To accomplish this, the NADH dependent ADH DmADH is cloned into pGV7001 replacing ScADH7 to generate pGV7001N.

[0352] S. cerevisiae which is deleted for all PDC genes (PDC1, PDC5 and PDC6) is dependent on C2-carbons such as ethanol or acetate for growth. Such a strain can be evolved to grow on glucose and hence be C2-independent (van Maris, A., et al., Applied and Environmental Microbiology, 2004, 70(1):159-166). GEVO1863 is a PDC-minus strain that has been evolved to grow on glucose. GEVO1863 is transformed with linear DNA from pGV1817 and from pGV7001N resulting in strain c2i-SC1M. This combination of linear DNA contains genes coding for all five isobutanol pathway enzymes, the S. cerevisiae PDC1 promoter and terminator sequences for homologous integration into the PDC1 locus and the uracil marker for selection. This homologous replacement event replaces the pdc1::ble allele with the isobutanol pathway. DmADH is not targeted to the mitochondria. All other pathway enzymes are targeted to the mitochondria. Pathway enzymes that are not natively localized to the mitochondria are fused to mitochondrial targeting sequences that direct them to the mitochondria. The transformed cells are plated onto selective medium lacking uracil and incubated at 30° C. for 3-4 days. After 3-4 days colonies are patched onto selective plates and these patches are used for colony PCR and RT-PCR to verify correct integration and transcription of the pathway genes. Three verified clones from each transformation are used to inoculate 3 mL overnight cultures in YPD. As controls, the parental GEVO1863 and the strain c2i-SC1 containing the imbalanced pathway, are used. These overnight cultures are used to inoculate 100 mL cultures in 1 L YPD shake flasks. The cultures are harvested at an OD600 of 0.6-0.8. The cells are resuspended in 50 mL fresh YPD medium and the cultures are incubated in 250 mL shake flasks at 30° C., 250 rpm. 2 mL samples are taken at 24 and 48 hours after inoculation. The fermentation is ended after 48 hours. Samples are processed and analyzed by HPLC and GC.

### Example 17

### Mitochondrial Production of Isobutanol in K. Marxianus with Cofactor Usage Partially Balanced by NADH Dependent KARI, Wherein ALS, KARI, DHAD, and KIVD are Targeted to the Mitochondria

[0353] This example illustrates how mitochondrial production is achieved in yeast with cofactor usage partially balanced by NADH dependent KARI, wherein ALS, KARI, DHAD, and KIVD are targeted to the mitochondria. With these modifications, strain AK will generally exhibit higher isobutanol productivity, titer, and/or yield as compared to strain A and the parent strain GEVO1947, while at the same time, exhibiting reduced ethanol production.

[0354] As disclosed herein, one approach to balance the cofactor usage between glycolysis and the isobutanol pathway is the use of NADH dependent KARI and ADH. To accomplish this, the mitochondrially targeted NADH dependent KARI is cloned into pGV1832 replacing ScILV5 to generate pGV1832N.

[0355] To construct strain AK, GEVO1947 is first transformed with linear DNA from pGV1832N and from pGV1834 resulting in strain AK. Each combination of linear DNA contains genes coding for all five isobutanol pathway enzymes, the K. marxianus PDC1 promoter and terminator sequences for homologous integration into the PDC1 locus and the uracil marker for selection. This homologous replacement event results in the simultaneous integration of the isobutanol pathway along with the deletion of the PDC1 coding sequence. ADH7 is not targeted to the mitochondria. All other pathway enzymes are targeted to the mitochondria. Pathway enzymes that are not natively localized to the mitochondria are fused to mitochondrial targeting sequences that direct them to the mitochondria. The transformed cells are plated onto selective medium without uracil and incubated at 30° C. for 3 days. After 3 days colonies are patched onto selective plates and these patches are used for colony PCR and RT-PCR to verify correct integration and transcription of the pathway genes. Three verified clones from each transformation are used to inoculate 3 mL overnight cultures in YPD. As controls GEVO1947 and the pathway containing the NADPH dependent isobutanol pathway, strain A, are used. These cultures are used to inoculate 100 mL YPD cultures in 1 L shake flasks. These overnight cultures are harvested at an OD600 of 0.6-0.8. The cells are resuspended in 50 mL fresh YPD medium and the cultures are incubated in 250 mL shake flasks at 30° C., 250 rpm. 2 mL samples are taken at 24 and 48 hours after inoculation. The fermentation is ended after 48 hours. Samples are processed and analyzed by HPLC and GC.

### Example 18

### Mitochondrial Production of Isobutanol in S. Cerevisiae with Cofactor Usage Partially Balanced by NADH Dependent KARI, Wherein ALS, KARI, DHAD, and KIVD are Targeted to the Mitochondria

[0356] This example illustrates how mitochondrial production is achieved in yeast with cofactor usage partially balanced by NADH dependent KARI, wherein ALS, KARI, DHAD, and KIVD are targeted to the mitochondria. With these modifications, strain SCP1K will generally exhibit higher isobutanol productivity, titer, and/or yield as compared to strain SCP1 and the parent strain GEVO1186.

[0357] As disclosed herein, one approach to balance the cofactor usage between glycolysis and the isobutanol pathway is the use of NADH dependent KARI and ADH. To accomplish this, the mitochondrially targeted NADH dependent KARI is cloned into pGV1817 replacing ScILV5 to generate pGV1817N.

[0358] GEVO1186 is then transformed with linear DNA from pGV1817N and from pGV7001 resulting in strain SCP1K. Each combination of linear DNA contains genes coding for all five isobutanol pathway enzymes, the S. cerevisiae PDC1 promoter and terminator sequences for homologous integration into the PDC1 locus and the uracil marker for selection. This homologous replacement event results in the simultaneous integration of the isobutanol pathway along with the deletion of the PDC1 coding sequence. ADH7 is not targeted to the mitochondria. All other pathway enzymes are targeted to the mitochondria. Pathway enzymes that are not natively localized to the mitochondria are fused to mitochondrial targeting sequences that direct them to the mitochondria. The transformed cells are plated onto selective medium without uracil and incubated at 30° C. for 3 days. After 3 days colonies are patched onto selective plates and these patches are used for colony PCR and RT-PCR to verify correct integration and transcription of the pathway genes. Three verified clones from each transformation are used to inoculate 3 mL overnight cultures in YPD. As controls GEVO1186 and the pathway containing the imbalanced pathway, strain SCP1, are used. These cultures are used to inoculate 100 mL YPD cultures in 1 L shake flasks. These cultures are harvested at an OD600 of 0.6-0.8. The cells are resuspended in 50 mL fresh YPD medium and the cultures are incubated in 250 mL shake flasks at 30° C., 250 rpm. 2 mL samples are taken at 24 and 48 hours after inoculation. The fermentation is ended after 48 hours. Samples are processed and analyzed by HPLC and GC.

### Example 19

### Mitochondrial Production of Isobutanol in K. Marxianus with Cofactor Usage Balanced and with ALS, KARI, DHAD, and KIVD Targeted to the Mitochondria

[0359] This example illustrates how mitochondrial production of isobutanol is achieved in yeast with balanced cofactor usage and with ALS, KARI, DHAD, and KIVD targeted to the mitochondria. With these modifications, strain APN will generally exhibit higher isobutanol productivity, titer, and/or yield as compared to strain AP and the parent strain GEVO1947.

[0360] To accomplish this, GEVO1947 is first transformed with linear DNA from pGV1817N and additional linear DNA from pGV7001N resulting in strain APN. This combination of linear DNA contains genes coding for all five isobutanol pathway enzymes, and the uracil marker for selection. The transformation leads to random (non-targeted) insertion of the isobutanol pathway into the K. marxianus genome. DmAdhp is targeted to its native compartment, the cytosol. All other pathway enzymes are targeted to the mitochondria. Pathway enzymes that are not natively localized to the mitochondria are fused to mitochondrial targeting sequences that direct them to the mitochondria. The transformed cells are plated onto selective medium without uracil and incubated at 30° C. for 3 days. After 3 days colonies are patched onto selective plates and these patches are used for colony PCR and RT-PCR to verify correct integration and transcription of the pathway genes. Three verified clones from each transformation are used to inoculate 3 mL overnight cultures in YPD. As controls GEVO1947 and strain AP are used. The overnight cultures are used to inoculate 100 mL YPD cultures in 1 L shake flasks. These cultures are harvested at an OD600 of 0.6-0.8. The cells are resuspended in 50 mL fresh YPD medium and the cultures are incubated in 250 mL shake flasks at 30° C., 250 rpm. 2 mL samples are taken at 24 and 48 hours after inoculation. The fermentation is ended after 48 hours. Samples are processed and analyzed by HPLC and GC.

### Example 20

### Mitochondrial Production of Isobutanol in K. Marxianus with Cofactor Usage Balanced, Wherein all Pathway Enzymes Targeted to the Mitochondria and PDC Deleted

[0361] This example illustrates how mitochondrial production of isobutanol is achieved in yeast with balanced cofactor usage, wherein all pathway enzymes are targeted to the mitochondria. With these modifications, strain A1N will generally exhibit higher isobutanol productivity, titer, and/or yield as compared to strain A1 and the parent strain GEVO1947. At the same time, strains A1N and A1 will generally exhibit reduced ethanol production as compared to the parent strain GEVO1947.

[0362] To accomplish this, GEVO1947 is first transformed with linear DNA from pGV1832N and additional linear DNA from pGV9834N resulting in strain A1N. The combination of linear DNA contains genes coding for all five isobutanol pathway enzymes, the K. marxianus PDC1 promoter and terminator sequences for homologous integration into the PDC1 locus and the uracil marker for selection. This homologous replacement event results in the simultaneous integration of the isobutanol pathway along with the deletion of the PDC1 coding sequence. All pathway enzymes are targeted to the mitochondria. Pathway enzymes that are not natively localized to the mitochondria are fused to mitochondrial targeting sequences that direct them to the mitochondria. The transformed cells are plated onto selective medium without uracil and incubated at 30° C. for 3 days. After 3 days colonies are patched onto selective plates and these patches are used for colony PCR and RT-PCR to verify correct integration and transcription of the pathway genes. Three verified clones from each transformation are used to inoculate 3 mL overnight cultures in YPD. As controls GEVO1947 and strain A1 are used. These cultures are used to inoculate 100 mL YPD cultures in 1 L shake flasks. These cultures are harvested at an OD600 of 0.6-0.8. The cells are resuspended in 50 mL fresh YPD medium and the cultures are incubated in 250 mL shake flasks at 30° C., 250 rpm. 2 mL samples are taken at 24 and 48 hours after inoculation. The fermentation is ended after 48 hours. Samples are processed and analyzed by HPLC and GC.

### Example 21

### Mitochondrial Production of Isobutanol in K. marxianus with Cofactor Usage Balanced and with all Pathway Enzymes Targeted to the Mitochondria

[0363] This example illustrates how mitochondrial production of isobutanol is achieved in yeast with balanced cofactor usage, wherein all pathway enzymes are targeted to the mitochondria. With these modifications, strain A1PN will generally exhibit higher isobutanol productivity, titer, and/or yield as compared to strain A1P and the parent strain GEVO1947.

[0364] To accomplish this, GEVO1947 is first transformed with linear DNA from pGV1817N and additional linear DNA from pGV7101N resulting in strain A1PN. This combination of linear DNA contains genes coding for all five isobutanol pathway enzymes, and the uracil marker for selection. The transformation leads to random (non-targeted) integration of the isobutanol pathway into the K. marxianus genome. All pathway enzymes are targeted to the mitochondria. Pathway enzymes that are not natively localized to the mitochondria are fused to mitochondrial targeting sequences that direct them to the mitochondria. The transformed cells are plated onto selective medium without uracil and incubated at 30° C. for 3 days. After 3 days colonies are patched onto selective plates and these patches are used for colony PCR and RT-PCR to verify correct integration and transcription of the pathway genes. Three verified clones from each transformation are used to inoculate 3 mL overnight cultures in YPD. As controls GEVO1947 and strain A1P are used. These cultures are used to inoculate 100 mL YPD cultures in 1 L shake flasks. These cultures are harvested at an OD600 of 0.6-0.8. The cells are resuspended in 50 mL fresh YPD medium and the cultures are incubated in 250 mL shake flasks at 30° C., 250 rpm. 2 mL samples are taken at 24 and 48 hours after inoculation. The fermentation is ended after 48 hours. Samples are processed and analyzed by HPLC and GC.

### Example 22

### Mitochondrial Production of Isobutanol in S. cerevisiae with Cofactor Usage Balanced and with all Pathway Enzymes Targeted to the Mitochondria

[0365] This example illustrates how mitochondrial production of isobutanol is achieved in yeast with balanced cofactor usage, wherein all pathway enzymes are targeted to the mitochondria. With these modifications, strain SCPA1N will generally exhibit higher isobutanol productivity, titer, and/or yield as compared to strain SCPA1 and the parent strain GEVO1186.

[0366] To accomplish this, GEVO1186, a diploid CEN.PK strain, is first transformed with linear DNA from pGV1817N and additional linear DNA from either pGV7101N resulting in strain SCPA1N. Each combination of linear DNA contains genes coding for all five isobutanol pathway enzymes, the S. cerevisiae PDC1 promoter and terminator sequences for homologous integration into the PDC1 locus and the uracil marker for selection. This homologous replacement event results in the simultaneous integration of the isobutanol pathway along with the deletion of the PDC1 coding sequence. All pathway enzymes are targeted to the mitochondria. Isobutanol pathway enzymes that are not natively localized to the mitochondria are fused to mitochondrial targeting sequences that direct them to the mitochondria. The transformed cells are plated onto selective medium without uracil and incubated at 30° C. for 3-4 days. After 3-4 days colonies are patched onto selective plates and these patches are used for colony PCR and RT-PCR to verify correct integration and transcription of the pathway genes. Three verified clones from each transformation are used to inoculate 3 mL overnight cultures in YPD. As controls GEVO1186 and strain SCPA1 are used. These overnight cultures are used to inoculate 100 mL YPD cultures in 1 L shake flasks. The cultures are harvested at an OD600 of 0.6-0.8. The cells are resuspended in 50 mL fresh YPD medium and the cultures are incubated in 250 mL shake flasks at 30° C., 250 rpm. 2 mL samples are taken at 24 and 48 hours after inoculation. The fermentation is ended after 48 hours. Samples are processed and analyzed by HPLC and GC.

### Example 23

### Mitochondrial Production of Isobutanol in a PDC-Minus S. cerevisiae with Cofactor Usage Balanced and with all Pathway Enzymes Targeted to the Mitochondria

[0367] This example illustrates how mitochondrial production of isobutanol is achieved in PDC-minus yeast with balanced cofactor usage, wherein all pathway enzymes are targeted to the mitochondria. With these modifications, strain SCA1N will generally exhibit higher isobutanol productivity, titer, and/or yield as compared to strain SCA1 and the parent strain GEVO7777, while at the same time, exhibiting reduced ethanol production.

[0368] To accomplish this, GEVO7777, which is deleted for PDC5 and PDC6, is first transformed with linear DNA from pGV1817N and additional linear DNA from pGV7101N resulting in strain SCA1N. The combination of linear DNA contains genes coding for all five isobutanol pathway enzymes, the S. cerevisiae PDC1 promoter and terminator sequences for homologous integration into the PDC1 locus and the uracil marker for selection. This homologous replacement event results in the simultaneous integration of the isobutanol pathway along with the deletion of the PDC1 coding sequence. All pathway enzymes are targeted to the mitochondria. Pathway enzymes that are not natively localized to the mitochondria are fused to mitochondrial targeting sequences that direct them to the mitochondria. The transformed cells are plated onto selective medium using ethanol as carbon source and lacking uracil and incubated at 30° C. for 3-4 days. After 3-4 days colonies are patched onto selective plates and these patches are used for colony PCR and RT-PCR to verify correct integration and transcription of the pathway genes. Three verified clones from each transformation are used to inoculate 3 mL overnight cultures in YPEthanol. As a control GEVO7777 and strain SCA1 are used. These overnight cultures are used to inoculate 100 mL YPEthanol cultures in 1 L shake flasks. The cultures are harvested at an OD600 of 0.6-0.8. The cells are resuspended in 50 mL fresh YPD medium and the cultures are incubated in 250 mL shake flasks at 30° C., 250 rpm. 2 mL samples are taken at 24 and 48 hours after inoculation. The fermentation is ended after 48 hours. Samples are processed and analyzed by HPLC and GC.

### Example 24

### Mitochondrial Production of Isobutanol in C2-Independent PDC-Minus S. Cerevisiae with Cofactor Usage Balanced and with all Pathway Enzymes Targeted to the Mitochondria

[0369] This example illustrates how mitochondrial production of isobutanol is achieved in C2-independent PDC-minus yeast with balanced cofactor usage, wherein all pathway enzymes are targeted to the mitochondria. With these modifications, strain c2i-SCA1N will generally exhibit higher isobutanol productivity, titer, and/or yield as compared to strain c2i-SCA1 and the parent strain GEVO1863.

[0370] S. cerevisiae which is deleted for all PDC genes (PDC1, PDC5 and PDC6) is dependent on C2-carbons such as ethanol or acetate for growth. Such a strain can be evolved to grow on glucose and hence be C2-independent (van Maris, A., et al., Applied and Environmental Microbiology, 2004, 70(1):159-166). GEVO1863 is a Pdc-minus strain that has been evolved for growth on glucose. GEVO1863 is transformed with linear DNA from pGV1817N and additional linear DNA from pGV7101N resulting in strain c2i-SCA1N. Each combination of linear DNA contains genes coding for all five isobutanol pathway enzymes, the S. cerevisiae PDC1 promoter and terminator sequences for homologous integration into the PDC1 locus and the uracil marker for selection. This homologous replacement event simultaneous integrates the isobutanol pathway along with replacing the pdc1::ble allele. All pathway enzymes are targeted to the mitochondria. Pathway enzymes that are not natively localized to the mitochondria are fused to mitochondrial targeting sequences that direct them to the mitochondria. The transformed cells are plated onto selective medium lacking uracil and incubated at 30° C. for 3-4 days. After 3-4 days colonies are patched onto selective plates and these patches are used for colony PCR and RT-PCR to verify correct integration and transcription of the pathway genes. Three verified clones from each transformation are used to inoculate 3 mL overnight cultures in YPD. As controls GEVO1863 and c2i-SCA1 are used. These overnight cultures are used to inoculate 100 mL YPD cultures in 1 L shake flasks. The cultures are harvested at an OD600 of 0.6-0.8. The cells are resuspended in 50 mL fresh YPD medium and the cultures are incubated in 250 mL shake flasks at 30° C., 250 rpm. 2 mL samples are taken at 24 and 48 hours after inoculation. The fermentation is ended after 48 hours. Samples are processed and analyzed by HPLC and GC.

### Example 25

### Anaerobic Mitochondrial Production of Isobutanol in S. Cerevisiae with Cofactor Usage Balanced by NADH Dependent KARI and ADH, Wherein ALS, KARI, DHAD, and KIVD are Targeted to the Mitochondria

[0371] This example illustrates how anaerobic mitochondrial production of isobutanol is achieved in yeast possessing NADH dependent KARI and ADH enzymes. With these modifications, strain SCP1N will generally exhibit higher isobutanol productivity, titer, and/or yield under anaerobic conditions as compared to strain SCP1 and the parent strain GEVO1186.

[0372] As disclosed herein, one approach to balance the cofactor usage between glycolysis and the isobutanol pathway is the use of NADH dependent KARI and ADH. To accomplish this, the mitochondrially targeted NADH dependent KARI is cloned into pGV1817 replacing ScILV5 to generate pGV1817N. The NADH dependent ADH DmADH is cloned into pGV7001 replacing ScADH7 to generate pGV7001N.

[0373] GEVO1186, a diploid CEN.PK strain is then transformed with linear DNA from pGV1817N and from pGV7001N resulting in strain SCP1N. This combination of linear DNA contains genes coding for all five isobutanol pathway enzymes, the S. cerevisiae PDC1 promoter and terminator sequences for homologous integration into the PDC1 locus and the uracil marker for selection. This homologous replacement event results in the simultaneous integration of the isobutanol pathway along with the deletion of the PDC1 coding sequence. The NADH dependent ADH is not targeted to the mitochondria. All other pathway enzymes are targeted to the mitochondria. Pathway enzymes that are not natively localized to the mitochondria are fused to mitochondrial targeting sequences that direct them to the mitochondria. The transformed cells are plated onto selective medium without uracil and incubated at 30° C. for 3 days. After 3 days colonies are patched onto selective plates and these patches are used for colony PCR and RT-PCR to verify correct integration and transcription of the pathway genes. Three verified clones from each transformation are used to inoculate 3 mL overnight cultures in YPD. As controls parental strain GEVO1186 and the strain SCP1, which contains the imbalanced pathway, are used. These overnight cultures are used to inoculate 100 mL cultures in 1 L shake flasks. The cultures are harvested at an OD600 of 0.6-0.8. The cells are resuspended in 20 mL fresh YPD medium and the cultures are incubated in 100 mL stoppered serum bottles at 30° C. 2 mL samples are taken at 24 and 48 hours after inoculation. The fermentation is ended after 48 hours. Samples are processed and analyzed by HPLC and GC.

### Example 26

### Mitochondrial Production of Isobutanol with Cofactor Usage Balanced by Malate Bypass, Wherein ALS, KARI, DHAD, and KIVD are Targeted to the Mitochondria

[0374] This example illustrates how mitochondrial production of isobutanol is achieved in yeast with cofactor usage balanced by malate bypass, wherein ALS, KARI, DHAD, and KIVD are targeted to the mitochondria. With these modifications, malate-bypass containing strains will generally exhibit higher isobutanol productivity, titer, and/or yield as compared to their respective parent strains.

[0375] As disclosed herein, one approach to balance the cofactor usage for the production of isobutanol from glucose is the use of a malate bypass in which the NADH generated from glycolysis is consumed in the production of malate from phosphoenol pyruvate. Malate is then transported into the mitochondria and used to generate NADPH and pyruvate. To introduce this bypass the following genes are overexpressed in the yeast host: PCK1, MDH2, DIC1 and MAE1. pGV8000 is a plasmid in which these genes are expressed using strong constitutive promoters. The plasmid also expresses the hygromycin resistance gene, hph. Downstream of the pathway genes, pGV8000 carries a sequence which consists of, from 5′ to 3′, S. cerevisiae PDC6 terminator, a unique restriction site (HpaI), and the PDC6 promoter. pGV8000 is linearized by digestion with HpaI and is transformed into K. marxianus strains A, AM, AK, AP, and APM for random integration into the chromosome. This results in the K. marxianus strains AMB, AMMB, AKMB, APMB, and APMMB respectively. This linearized pGV8000, when transformed into S. cerevisiae homologously replaces the PDC6 locus of S. cerevisiae. The linearized pGV8000 is transformed into strains SCP1, SCP1M, SCP1K, SC1, SC1M, c2i-SC1, and c2i-SC1M resulting in strains SCP1 MB, SCP1MMB, SCP1KMB, SC1 MB, SC1MMB, c2i-SC1 MB, and c2i-SC1MMB respectively. The transformed cells are plated onto YPD medium supplemented with hygromycin. Except in the case of SC1, SC1 MB, SC1MMB and SC1M strains, YPEthanol supplemented with hygromycin is used. The plates are incubated at 30° C. for 3-4 days. After 3-4 days colonies are patched onto selective plates and these patches are used for colony PCR and RT-PCR to verify correct integration and transcription of the malate bypass genes, respectively. Three verified clones from each transformation are used to inoculate 3 mL overnight cultures in YPD or in YPEthanol for the strains SC1, SC1 MB, SC1MMB and SC1M. The parent strains are used as controls. These overnight cultures are used to inoculate 100 mL cultures in 1 L YPD or YPEthanol shake flasks. These cultures are harvested at an OD600 of 0.6-0.8. The cells are resuspended in 50 mL fresh YPD medium and the cultures are incubated in 250 mL shake flasks at 30° C., 250 rpm. 2 mL samples are taken at 24 and 48 hours after inoculation. The fermentation is ended after 48 hours. Samples are processed and analyzed by HPLC and GC.

### Example 27

### Mitochondrial Production of Isobutanol with Cofactor Usage Balanced by Malate Bypass, Wherein all Isobutanol Pathway Enzymes are Targeted to the Mitochondria

[0376] This example illustrates how mitochondrial production of isobutanol is achieved in yeast with cofactor usage balanced by malate bypass, wherein all isobutanol pathway enzymes are targeted to the mitochondria. With these modifications, malate-bypass containing strains will generally exhibit higher isobutanol productivity, titer, and/or yield as compared to their respective parent strains.

[0377] As disclosed herein, one approach to balance the cofactor usage for the production of isobutanol from glucose is the use of a malate bypass in which the NADH generated from glycolysis is consumed in the production of malate from phosphoenol pyruvate. Malate is then transported into the mitochondria and used to generate NADPH and pyruvate. To introduce this bypass the following genes are overexpressed in the yeast host: PCK1, MDH2, DIC1 and MAE1. pGV8000 is a plasmid in which these genes are expressed using strong constitutive promoters. The plasmid also expresses the hygromycin resistance gene, hph. Downstream of the pathway genes, pGV8000 carries a sequence which consists of, from 5′ to 3′, S. cerevisiae PDC6 terminator, a unique restriction site (HpaI), and the PDC6 promoter. pGV8000 is linearized by digestion with HpaI and is transformed into K. marxianus strains A1 and A1P for random integration into the chromosome. This results in the K. marxianus strains A1MB, and A1PMB, respectively. This linearized pGV8000, when transformed into S. cerevisiae homologously replaces the PDC6 locus of S. cerevisiae. The linearized pGV8000 is transformed into strains SCPA1, SCA1, and c2i-SCA1 resulting in strains SCPA1MB, SCA1MB, and c2i-SCA1MB respectively. The transformed cells are plated onto YPD medium supplemented with hygromycin. Except in the case of strains SCA1 and SCA1MB, for which YPEthanol supplemented with hygromycin is used. The plates are incubated at 30° C. for 3-4 days. After 3-4 days colonies are patched onto selective plates and these patches are used for colony PCR and RT-PCR to verify correct integration and transcription of the malate bypass genes, respectively. Three verified clones from each transformation are used to inoculate 3 mL overnight cultures in YPD or in YPEthanol for the strains SCA1 and SCA1MB. The parent strains are used as controls. These overnight cultures are used to inoculate 100 mL cultures in 1 L YPD or YPEthanol shake flasks. These cultures are harvested at an OD600 of 0.6-0.8. The cells are resuspended in 50 mL fresh YPD medium and the cultures are incubated in 250 mL shake flasks at 30° C., 250 rpm. 2 mL samples are taken at 24 and 48 hours after inoculation. The fermentation is ended after 48 hours. Samples are processed and analyzed by HPLC and GC. The malate-bypass containing strains show higher isobutanol productivity, titer and yield when compared to their respective parent strains.

### Example 28

### Mitochondrial Production of Isobutanol with Cofactor Balance Through Overexpression of a Fungal Transhydrogenase, Wherein ALS, KARI, DHAD, and KIVD are Targeted to the Mitochondria

[0378] This example illustrates how mitochondrial production of isobutanol is achieved in yeast with cofactor usage balanced via the overexpression of a fungal transhydrogenase, wherein ALS, KARI, DHAD, and KIVD are targeted to the mitochondria. With these modifications, the transhydrogenase containing strains will generally exhibit higher isobutanol productivity, titer, and/or yield as compared to their respective parent strains.

[0379] As disclosed herein, one approach to balance the cofactor usage between glycolysis and the isobutanol pathway is the use of a transhydrogenase in which the NADH generated from glycolysis is transferred into the mitochondria by the acetaldehyde/ethanol shuttle. In the mitochondria the NADH is converted into NADPH by a transhydrogenase which is integrated into the mitochondrial inner membrane. pGV9000 containing the transhydrogenase gene from Neurospora crassa is linearized by digestion with HpaI and transformed into K. marxianus strains A, AM, AK, AP, and APM for random integration into the chromosome. This results in the K. marxianus strains ATH, AMTH, AKTH, APTH, and APMTH respectively. This linearized pGV9000, when transformed into S. cerevisiae will homologously replace the PDC6 locus of S. cerevisiae. The linearized pGV9000 is transformed into strains SCP1, SCP1M, SCP1K, SC1, SC1M, c2i-SC1, and c2i-SC1M resulting in strains SCP1TH, SCP1MTH, SCP1KTH, SC1TH, SC1MTH, c2i-SC1TH, and c2i-SC1MTH respectively. The transformed strains are plated onto YPD medium supplemented with hygromycin. In the case of SC1, SC1TH, SC1MTH and SC1M strains, YPEthanol supplemented with hygromycin is used. All plates are incubated at 30° C. for 3-4 days. After 3-4 days colonies are patched onto selective plates and these patches are used for colony PCR and RT-PCR to verify correct integration and transcription of the transhydrogenase genes, respectively. Three verified clones from each transformation are used to inoculate 3 mL overnight cultures in YPD or YPEthanol for the Saccharomyces strains SC1, SC1TH, SC1MTH and SC1M. The parent strains are used as control. These overnight cultures are used to inoculate 100 mL cultures in 1 L shake flasks. These cultures are harvested at an OD600 of 0.6-0.8. The cells are resuspended in 50 mL fresh YPD medium and the cultures are incubated in 250 mL shake flasks at 30° C., 250 rpm. 2 mL samples are taken at 24 and 48 hours after inoculation. The fermentation is ended after 48 hours. Samples are processed and analyzed by HPLC and GC.

### Example 29

### Mitochondrial Production of Isobutanol with Cofactor Balance Through Overexpression of a Fungal Transhydrogenase, Wherein all Isobutanol Pathway Enzymes are Targeted to the Mitochondria

[0380] This example illustrates how mitochondrial production of isobutanol is achieved in yeast with cofactor usage balanced via the overexpression of a fungal transhydrogenase, wherein all isobutanol pathway enzymes are targeted to the mitochondria. With these modifications, the transhydrogenase containing strains will generally exhibit higher isobutanol productivity, titer, and/or yield as compared to their respective parent strains.

[0381] As disclosed herein, one approach to balance the cofactor usage between glycolysis and the isobutanol pathway is the use of a transhydrogenase in which the NADH generated from glycolysis is transferred into the mitochondria by the acetaldehyde/ethanol shuttle. In the mitochondria the NADH is converted into NADPH by a transhydrogenase which is integrated into the mitochondrial inner membrane. pGV9000 containing the transhydrogenase gene from Neurospora crassa is linearized by digestion with HpaI and transformed into K. marxianus strains A1 and A1P for random insertion into the chromosome. This results in the K. marxianus strains A1TH and A1PTH, respectively. This linearized pGV9000, when transformed into S. cerevisiae will homologously replace the PDC6 locus of S. cerevisiae. The linearized pGV9000 is transformed into strains SCPA1, SCA1, and c2i-SCA1, resulting in strains SCPA1TH, SCA1TH, and c2i-SCA1TH, respectively. The transformed strains are plated onto YPD medium supplemented with hygromycin. In the case of SCA1 and SCA1TH strains, YPEthanol supplemented with hygromycin is used. All plates are incubated at 30° C. for 3-4 days. After 3-4 days colonies are patched onto selective plates and these patches are used for colony PCR and RT-PCR to verify correct integration and transcription of the transhydrogenase genes, respectively. Three verified clones from each transformation are used to inoculate 3 mL overnight cultures in YPD or YPEthanol for the Saccharomyces strains SC1TH and SC1MTH. The parent strains are used as control. These overnight cultures are used to inoculate 100 mL cultures in 1 L shake flasks. These cultures are harvested at an OD600 of 0.6-0.8. The cells are resuspended in 50 mL fresh YPD medium and the cultures are incubated in 250 mL shake flasks at 30° C., 250 rpm. 2 mL samples are taken at 24 and 48 hours after inoculation. The fermentation is ended after 48 hours. Samples are processed and analyzed by HPLC and GC.

### Example 30

### Anaerobic Mitochondrial Production of Isobutanol with Cofactor Usage Balanced by Malate Bypass, Wherein ALS, KARI, DHAD, and KIVD are Targeted to the Mitochondria

[0382] This example illustrates how anaerobic mitochondrial production of isobutanol is achieved in yeast with cofactor usage balanced by malate bypass, wherein ALS, KARI, DHAD, and KIVD are targeted to the mitochondria. With these modifications, malate-bypass containing strains will generally exhibit higher isobutanol productivity, titer, and/or yield under anaerobic conditions as compared to their respective parent strains.

[0383] As disclosed herein, one approach to balance the cofactor usage for the production of isobutanol from glucose is the use of a malate bypass in which the NADH generated from glycolysis is consumed in the production of malate from phosphoenol pyruvate. Malate is then transported into the mitochondria and used to generate NADPH and pyruvate. To introduce this bypass the following genes are overexpressed in the yeast host: PCK1, MDH2, DIC1 and MAE1. pGV8000 is a plasmid in which these genes are expressed using strong constitutive promoters. The plasmid also expresses the hygromycin resistance gene, hph. Downstream of the pathway genes, pGV8000 carries a sequence which consists of, from 5′ to 3′, S. cerevisiae PDC6 terminator, a unique restriction site (HpaI), and the PDC6 promoter. pGV8000 is linearized by digestion with HpaI and is transformed into K. marxianus strains A, AM, AK, AP, and APM for random integration into the chromosome. This results in the K. marxianus strains AMB, AMMB, AKMB, APMB, and APMMB respectively. This linearized pGV8000, when transformed into S. cerevisiae homologously replaces the PDC6 locus of S. cerevisiae. The linearized pGV8000 is transformed into strains SCP1, SCP1M, SCP1K, SC1, SC1M, c2i-SC1, and c2i-SC1M resulting in strains SCP1 MB, SCP1MMB, SCP1KMB, SC1 MB, SC1MMB, c2i-SC1 MB, and c2i-SC1MMB respectively. The transformed cells are plated onto YPD medium supplemented with hygromycin. Except in the case of SC1, SC1 MB, SC1MMB and SC1M strains, YPEthanol supplemented with hygromycin is used. The plates are incubated at 30° C. for 3-4 days. After 3-4 days colonies are patched onto selective plates and these patches are used for colony PCR and RT-PCR to verify correct integration and transcription of the malate bypass genes, respectively. Three verified clones from each transformation are used to inoculate 3 mL overnight cultures in YPD or in YPEthanol for the strains SC1, SC1 MB, SC1MMB and SC1M. The parent strains are used as controls. These overnight cultures are used to inoculate 100 mL cultures in 1 L YPD or YPEthanol shake flasks. These cultures are harvested at an OD600 of 0.6-0.8. The cells are resuspended in 20 mL fresh YPD medium and the cultures are incubated in 100 mL stoppered serum bottles at 30° C., 250 rpm. 2 mL samples are taken at 24 and 48 hours after inoculation. The fermentation is ended after 48 hours. Samples are processed and analyzed by HPLC and GC.

### Example 31

### Anaerobic Mitochondrial Production of Isobutanol with Cofactor Balance through overexpression of a fungal transhydrogenase, wherein ALS, KARI, DHAD, and KIVD are Targeted to the Mitochondria

[0384] This example illustrates how anaerobic mitochondrial production of isobutanol is achieved in yeast with cofactor usage balanced via the overexpression of a fungal transhydrogenase, wherein ALS, KARI, DHAD, and KIVD are targeted to the mitochondria. With these modifications, the transhydrogenase containing strains will generally exhibit higher anaerobic isobutanol productivity, titer, and/or yield as compared to their respective parent strains.

[0385] As disclosed herein, one approach to balance the cofactor usage between glycolysis and the isobutanol pathway is the use of a transhydrogenase in which the NADH generated from glycolysis is transferred into the mitochondria by the acetaldehyde/ethanol shuttle. In the mitochondria the NADH is converted into NADPH by a transhydrogenase which is integrated into the mitochondrial inner membrane. pGV9000 containing the transhydrogenase gene from Neurospora crassa is linearized by digestion with HpaI and transformed into K. marxianus strains A, AM, AK, AP, and APM for random integration into the chromosome. This results in the K. marxianus strains ATH, AMTH, AKTH, APTH, and APMTH respectively. This linearized pGV9000, when transformed into S. cerevisiae will homologously replace the PDC6 locus of S. cerevisiae. The linearized pGV9000 is transformed into strains SCP1, SCP1M, SCP1K, SC1, SC1M, c2i-SC1, and c2i-SC1M resulting in strains SCP1TH, SCP1MTH, SCP1KTH, Sc1TH, Sc1MTH, c2i-SC1TH, and c2i-SC1MTH respectively. The transformed strains are plated onto YPD medium supplemented with hygromycin. In the case of SC1, SC1TH, SC1MTH and SC1M strains, YPEthanol supplemented with hygromycin is used. All plates are incubated at 30° C. for 3-4 days. After 3-4 days colonies are patched onto selective plates and these patches are used for colony PCR and RT-PCR to verify correct integration and transcription of the transhydrogenase genes, respectively. Three verified clones from each transformation are used to inoculate 3 mL overnight cultures in YPD or YPEthanol for the Saccharomyces strains SC1, SC1TH, SC1MTH and SC1M. The parent strains are used as control. These overnight cultures are used to inoculate 100 mL cultures in 1 L shake flasks. These cultures are harvested at an OD600 of 0.6-0.8. The cells are resuspended in 20 mL fresh YPD medium and the cultures are incubated in 100 mL stoppered serum bottles at 30° C., 250 rpm. 2 mL samples are taken at 24 and 48 hours after inoculation. The fermentation is ended after 48 hours. Samples are processed and analyzed by HPLC and GC.

### Example 32

### Comparison of Strains GEVO1820, GEVO2062 and GEVO2072

[0386] The goal of this experiment was to integrate mitochondrially targeted isobutanol pathways into the PDC1 locus of a diploid S. cerevisiae and to evaluate the ability of these strains to produce isobutanol in comparison to a strain expressing a cytosolically expressed isobutanol pathway. Mitochondrial targeting peptide sequences were added to the protein sequences of ALS, KIVD, and Aro10 in order to localize these proteins in the mitochondria. Because isobutyraldehyde is expected to be membrane permeable, it should be available as a substrate for the Adh7 enzyme overexpressed in the cytosol.

[0387] This example describes the comparison of two strains containing mitochondrially targeted isobutanol pathways: GEVO2062 and GEVO2072 (Table 1) with a strain containing a cytosolic isobutanol pathway. GEVO2072 and GEVO2062 are PDC positive diploid strains containing a mitochondrially targeted acetolactate synthase from B. subtilis (alsS), and a cytosolic S. cerevisiae alcohol dehydrogenase (ADH7). In addition, GEVO2062 express a mitochondrially targeted Aro10 protein; while GEVO2072 expresses a mitochondrially targeted KIVD from Lactococcus lactis. GEVO2072 and GEVO2062 were constructed by integrating a set of genes from pGV1875 (SEQ ID NO: 92) and pGV1876 respectively (SEQ ID NO: 97) into one allele of the native PDC1 locus. The integrated genes in GEVO2072 encode the B. subtilis AlsS protein with 31 amino acids of the mitochondrial targeting leader-sequence from S. cerevisiae Cox4 protein, L. lactis 2-keto-acid decarboxylase (KIVD) with the carboxy-terminal mitochondrial targeting sequence from the S. cerevisiae Hmi1 protein, and S. cerevisiae ADH7, which is expressed in the cytosol. The integrated genes in GEVO2062 encode the B. subtilis ALS protein with 25 amino acids of the mitochondrial targeting leader-sequence from S. cerevisiae Cox4 protein, the S. cerevisiae Aro10 protein with the carboxy-terminal mitochondrial targeting sequence from the S. cerevisiae Hmi1 protein, and S. cerevisiae ADH7, which is expressed in the cytosol.

[0388] The third strain in this example GEVO1820 contains a completely cytosolically expressed isobutanol pathway. GEVO1820 was generated by transforming the diploid wild-type strain GEVO1186 with a 9.2 kb HpaI fragment from pGV1733. Ura+ transformants contained a homologous replacement of one of the two PDC6 alleles with a copy of the LlkivD2, ScADH7, and ScURA3 genes to generate strain GEVO1802. Next GEVO1802 was transformed with a 9.5 kb NruI fragment from pGV1731. Leu+ transformants contained a homologous replacement of one of the two PDC5 alleles with a copy of the EcilvCΔN (SEQ ID NO: 157), EcilvDΔNcoKl (SEQ ID NO: 158), and ScLEU2 genes to generate strain GEVO1805. Finally GEVO1805 was transformed with a 6.7 kb linear fragment from pGV1730. Trp+ transformants contained a homologous replacement of one of the two PDC1 alleles with a copy of the BsalsS2 gene (SEQ ID NO: 151) coding for BsAlsS2 (SEQ ID NO: 152) expressed from the P_{ScCUP1} promoter and the TRP1 gene; the resulting strain is GEVO1820.

[0389] For aerobic fermentations, precultures were inoculated using cells from a fresh plate that were resuspended in 1 mL of YPD medium. These cell suspensions were then used to inoculate 50 mL of YPD medium in 250 mL baffled shake flasks; these preculture flasks were incubated at 30° C. in an orbital shaker at 250 rpm until the cell population reached mid-to late-log phase. To start the fermentation, cells were harvested from the preculture flasks and were used to inoculate 25 mL of fresh YPD (50 g-glucose L⁻¹) medium to a final OD₆₀₀ of 1.6-1.9. The 25 mL fermentation cultures were incubated in 250 mL non-baffled flasks at 30° C. in an orbital shaker at 250 rpm. Samples (2 mL) were taken at 0, 9, 23, 31, 51, and 61 hours and cells were removed from the samples by centrifugation at ≧14,000×g for 10 min in a microcentrifuge. The supernatants from the samples were collected and the glucose concentration was measured at each time point on the YSI 2700 Select (YSI Life Sciences, Yellow Springs, Ohio, USA) according to manufacturer's protocols. The remaining supernatant volume was stored at 4° C. until analysis by Gas Chromatography and/or High Performance Liquid Chromatography as described above.

[0390] Because of the fast glucose consumption rate of these strain, glucose was added throughout the time course. For all three strains, the fermentation cultures were fed 83 g/L glucose at 9 h, 30 g/L at 23 h, 121 g/L at 31 h. Additionally, the cultures of GEVO2062 and GEVO2072 were fed 60 g/L glucose at 51 h. These concentrations are volume corrected to account for the significant dilution of the cultures by the glucose feed. The concentrations refer to the start volume of the cultures.

[0391] The differences observed between GEVO2062 and GEVO2072 during fermentation were minor GEVO2072 reached 15% higher titer than GEVO2062 (Table 4, FIG. 9). GEVO2072 grew to a 25% higher cell density and therefore the specific productivity of this strain was about 10% lower than that of GEVO2062. The yield was the same for both mitochondrial strains. GEVO2072 differs from GEVO2062 by the mitochondrial targeting sequence fused to ALS. GEVO2062 has a 25 amino acid targeting sequence from the Cox4 protein, while GEVO2072 has a 31 amino acid targeting sequence from the Cox4 protein. The other difference between the two strains is that GEVO2062 expresses the Aro10 protein for its KIVD enzyme, while GEVO2072 expresses the L. lactis KIVD protein. GEVO2072 consumed 16% more glucose and produced 27% more ethanol than GEVO2062 (FIG. 9). The isobutanol titers of the mitochondrial strains were 2.4 g/L and 2.1 g/L for GEVO2072 and GEVO2062 respectively at 61 h (FIG. 9).

[0392] In contrast, the strain with cytosolically expressed isobutanol pathway GEVO1820 showed lower rate, titer and yield compared to the mitochondrial strains (Table 4). GEVO1820 reached 20% of the titer and productivity and 30% of the yield compared to GEVO2062. In the first 23 h of the fermentation GEVO1820 reached about 50% of the productivity and yield compared to GEVO2062 but after the 23 h time point isobutanol production was very low (FIG. 10).

TABLE 4
Productivity, Titer, and Yield for GEVO1820,
GEVO2062 and GEVO2072.

| | Specific | | | | | |
|---|---|---|---|---|---|---|
| | Productivity | | Titer | | Yield | |
| Strains | [g/L/h/OD] | ± | [g/L] | ± | % | ± |
| Gevo2072 | 0.0012 | 3.8E−05 | 2.4 | 0.1 | 2 | 0.1 |
| Gevo2062 | 0.0013 | 7.2E−05 | 2.1 | 0.1 | 2 | 0.1 |
| Gevo1820 | 0.0003 | 3.6E−05 | 0.4 | 0.03 | 0.6 | 0.06 |

### Example 33

### Determination of Enzymes Critical to Isobutanol Production

[0393] The goal of this example was to determine which pathway enzymes in GEVO2072 are critical for isobutanol production. Strains containing only two of the three pathway genes expressed in GEVO2072 were constructed by targeted directed integration of the genes to the PDC1 locus of the parent strain of GEVO2072 which is the wild-type strain GEVO1186. Strains GEVO2129 and GEVO2130 contain mitochondrially-targeted ALS and mitochondrially-targeted KIVD. The strains GEVO2127 and GEVO2128 contain a mitochondrially-targeted ALS and a cytosolically expressed ADH7. Strains GEVO2131 and GEVO2132 contain a mitochondrially-targeted KIVD protein with a cytosolically expressed ADH7. The performance of each strain in fermentation was compared to the performance of GEVO2072 to determine whether the absent enzyme is required for mitochondrial isobutanol production.

[0394] GEVO2072 (mitochondrially-targeted ALS and KIVD with a cytosolically expressed ADH) produced approximately 1.3 g/L of isobutanol by 55 hours. GEVO2127 and GEVO2128, containing the mitochondrially targeted ALS protein and the cytosolically expressed ADH like GEVO2072 but lacking mitochondrially targeted KIVD, still produced a similar isobutanol titer to GEVO2072 (Table 5).

TABLE 5
Productivity, titer, and yield at 55 hours for strains tested in the
first fermentation. GEVO2072 was run in triplicate, all other
strains were run in single fermentations. GEVO1186 is the
parent of all strains in this fermentation and serves as the
negative control.

| | Specific Productivity | | Titer | | Yield | |
|---|---|---|---|---|---|---|
| samples 55 h | [g/L/h/OD] | ± | [g/L] | ± | % | ± |
| GEVO1186 | 0.0003 | | 0.3 | | 0.6 | |
| GEVO2072 | 0.001 | 7.2E−06 | 1.3 | 0.03 | 2.3 | 0.1 |
| GEVO2127 | 0.001 | | 1.3 | | 2.2 | |
| GEVO2128 | 0.001 | | 1.2 | | 2.2 | |
| GEVO2130 | 0.0007 | | 0.8 | | 1.9 | |
| GEVO2131 | 0.0003 | | 0.3 | | 0.7 | |
| GEVO2132 | 0.0004 | | 0.5 | | 0.9 | |

[0395] Strains GEVO2129 and GEVO2130, containing mitochondrially targeted ALS and KIVD like GEVO2072, but lacking S cerevisiae ADH7 produced slightly less isobutanol than GEVO2072 at 55 hours, but by 72 hours, titers were similar to GEVO2072 (Table 6). However, all strains observed that lacked the mitochondrially targeted ALS protein (GEVO2131 and 2132) performed similar to the parental strain without the pathway and only made isobutanol at background levels (Table 5 and Table 6).

TABLE 6
Productivity, titer, and yield at 72 hours for strains tested in the second
fermentation. All strains were run in single fermentations. GEVO1186 is
the parent of all strains in this fermentation and
serves as the negative control.

| | Specific | | |
|---|---|---|---|
| | Productivity | Titer | Yield |
| samples 72 h | [g/L/h/OD] | [g/L] | [g/g] |
| GEVO1186a | 0.0002 | 0.2 | 0.2 |
| GEVO1186b | 0.0001 | 0.1 | 0.1 |
| GEVO2072a | 0.0006 | 1.1 | 1.1 |
| GEVO2072b | 0.0004 | 0.8 | 0.8 |
| GEVO2129 | 0.0004 | 0.7 | 0.7 |
| GEVO2130 | 0.0005 | 0.9 | 0.8 |

[0396] These observations suggest that ALS targeted to the mitochondrial compartment is critical to the mitochondrial isobutanol pathway, and in its absence, isobutanol cannot be produced above background concentrations. In short, of the three isobutanol pathway genes in GEVO2072, only mitochondrially-targeted ALS is required for isobutanol production. Because KIVD is not required for isobutanol production, an alternate enzyme is likely responsible for the conversion of α-keto-isovalerate to isobutyraldehyde. Likewise, because ADH7 is not required for isobutanol production, it is likely that endogenous ADH is responsible for the conversion of isobutyraldehyde to isobutanol.

### Example 34

### Introduction of BAT1 and BAT2 into GEVO2072 Leads to Increased and Sustained Isobutanol Production

[0397] An intermediate in both the valine and engineered isobutanol pathways is ketoisovalerate (KIV). The increase in isobutanol production observed upon the targeting of the B. subtilis BsalsS encoded acetolactate synthase to mitochondria, and the subsequent finding that this is the only enzyme required for the observed increase in isobutanol production, led to the proposed pathway in FIG. 10. Briefly, the pathway utilizes the exogenous acetolactate synthase activity encoded by B. subtilis BsalsS to generate acetolactate, which is subsequently utilized by the native Ilv5 (KARI), Ilv3 (DHAD), and Bat1 enzymes to produce valine. Valine crosses the inner and outer mitochondrial membranes into the cytosol, where it is subsequently converted by Bat2p into KIV. KIV is used as substrate by native KIVDs (including Pdc1 or Pdc5) for production of isobutyraldehyde, which is converted to isobutanol by either a native alcohol dehydrogenase or the overexpressed dehydrogenase encoded by S. cerevisiae ADH7.

[0398] To test the model above, the S. cerevisiae BAT2 was overexpressed in GEVO2072, a PDC-positive strain described above that contains a mitochondrially targeted acetolactate synthase from B. subtilis (alsS), a L. lactis 2-keto-acid decarboxylase (LlkivD), and a cytosolic S. cerevisiae alcohol dehydrogenase (ADH7). To overexpress BAT2, GEVO2072 was transformed with pGV1999 (SEQ ID NO: 93), a high-copy HIS3 marked yeast plasmid for production of the S. cerevisiae cytosolic Bat2p. Transformation of GEVO2072 with pGV1999 resulted in an initial increase in isobutanol production. Overexpression of the S. cerevisiae BAT2 in GEVO2072 led to a 60-70% increase in volumetric productivity (0.025±0.004 g/L/h), specific productivity (0.0027±0.004 g/L/h/OD), and yield (2.1±0.3%) compared to GEVO2072 (0.015 g/L/h, 0.0016 g/L/h/OD, and 1.3%) during the growth phase of the fermentation (Table 7). However, once in the stationary phase, the productivity in GEVO2072 with overexpressed S. cerevisiae BAT2 slowed, and the final isobutanol titer was similar to GEVO2072 at 71 hours (approximately 1 g/L).

TABLE 7
Productivity and Yields of GEVO2072 with pGV1999.

| | | |
|---|---|---|
| Vol. | Specific | |
| productivity | productivity | |
| (g/L/h) | (g/L/h/OD) | yield |

6-24 h

| | | | |
|---|---|---|---|
| pGV1999-GEVO2072 | 0.025 ± 0.004 | 0.0027 ± 0.0004 | 2.1 ± 0.3% |
| GEVO2072 | 0.015 | 0.0016 | 1.3% |

24-41 h

| | | | |
|---|---|---|---|
| pGV1999-GEVO2072 | 0.018 ± 0.006 | 0.0019 ± 0.0006 | 2.9 ± 0.9% |
| GEVO2072 | 0.015 | 0.0015 | 2.6% |

41-71 h

| | | | |
|---|---|---|---|
| pGV1999-GEVO2072 | 0.006 ± 0.003 | 0.0005 ± 0.0003 | 1.7 ± 0.7% |
| GEVO2072 | 0.014 | 0.0017 | 4.6% |

[0399] These data demonstrated that overexpression of S. cerevisiae BAT2 improves isobutanol production during log phase, suggesting that Bat2p is involved in isobutanol production in GEVO2072, and its lower expression during log phase leads to a lower rate. Because S. cerevisiae BAT1 is repressed in the stationary phase, the observed slower rate of production between 24 and 71 hours in the GEVO2072 strains with S. cerevisiae BAT2 overexpression could be the result of a reduced Bat1p activity upstream of Bat2p.

[0400] With this in mind, it was hypothesized that a reduction in S. cerevisiae BAT1 transcription as the cells entered stationary phase (Eden et al. 1996 The Journal of Biological Chemistry 271(34):20242-5) caused the observed reduction in the rate of isobutanol production in the GEVO2072 cells carrying the overexpression vector with the S. cerevisiae BAT2. To test this hypothesis, the S. cerevisiae BAT1 was cloned into a similar high-copy plasmid as the plasmid carrying the S. cerevisiae BAT2, and both plasmids were transformed into GEVO2072 and its parent strain, GEVO1186 (Table 1). In doing so, the inventors aimed to determine if overexpression of Sc_BAT1 and Sc_BAT2 from constitutive promoters on high-copy plasmids (2μ) would lead to increased and sustained isobutanol production.

[0401] To accomplish this, GEVO2072 was transformed with the S. cerevisiae BAT1 and BAT2 overexpression vectors pGV1999 and pGV2212 respectively to generate GEVO2878-GEVO2880 (Table 1). GEVO2878-GEVO2880 produced 1.2±0.1 g/L of isobutanol under low-aeration conditions in Yeast Nitrogen Base Dextrose (YNBD) medium with necessary auxotrophic supplements after 86 hours, which was 130% higher than GEVO2072 with empty vectors. Moreover, GEVO2878-GEVO2880 sustained a specific productivity of 0.005-0.006 g/L/OD/h for 86 hours, and produced isobutanol at a yield of 3.1%.

[0402] This example shows that overexpression of the S. cerevisiae BAT1 and BAT2 genes supports production of isobutanol at levels greater than double that observed with GEVO2072 after 90 hours (FIG. 11).

### Example 35

### Integration of pGV1875 into GEVO1947 to Create GEVO2087 and GEVO2088

[0403] The goal of this example was to randomly integrate the mitochondrially targeted isobutanol pathway, encoded by genes contained within pGV1875, into the genome of K marxianus. To this end, pGV1875 (SEQ ID NO: 92) was integrated into GEVO1947, and several transformants were screened for their ability to produce isobutanol in a shake flask fermentation experiment. Two transformants that produced ≧1.0 g/L isobutanol in 24 hours were named GEVO2087 and GEVO2088.

[0404] The K. marxianus strains GEVO2087 and GEVO2088 (Table 1) were constructed by transformation of GEVO1947 with pGV1875 that had been linearized with the restriction enzyme PvuI. The transformation was plated on SC-URA plates to select for integrants. Integrants were verified by colony PCR.

[0405] Seven of the eight transformants (#1, 2, 4-7, and 10), including GEVO2087 (Transformant #10) and GEVO2088 (Transformant #7) produced approximately 1 g/L isobutanol after 24 hours of incubation (FIG. 12a). Transformant #3 and GEVO1947 without the pathway produced less than 0.2 g/L isobutanol after 24 hours (FIG. 12a). All of the strains produced high levels of ethanol (>74 g/L), (FIG. 12b).

[0406] Table 8 summarizes the productivity, titers, and yields of isobutanol produced by the GEVO1947 transformants. All of the transformants, except #3, produced at least 1 g/L isobutanol with specific productivities of ˜0.001 g/L/h/OD isobutanol. Transformant #10 (GEVO2087) had the greatest values for productivities and titer compared to the other transformants, as well as the greatest yield (1.6%).

TABLE 8
Productivity, Titer, and Yield at 24 hrs for K. marxianus strains

| | Specific | Isobutanol | |
|---|---|---|---|
| | Productivity | Titer | Yield |
| | [g/L/h/OD] | [g/L] | % |
| GEVO1947 | 0.0001 | 0.2 | 0.2% |
| TRANS #1 | 0.0007 | 1 | 1.2% |
| TRANS #2 | 0.0014 | 1 | 1.1% |
| TRANS #3 | 0.0001 | 0.2 | 0.2% |
| TRANS #4 | 0.0007 | 1 | 1.4% |
| TRANS #5 | 0.0007 | 1 | 1.3% |
| TRANS #6 | 0.0007 | 1 | 1.3% |
| TRANS #7 | 0.0009 | 1 | 1.2% |
| (GEVO2088) | | | |
| TRANS #10 | 0.0010 | 1.1 | 1.6% |
| (GEVO2087) | | | |

[0407] This example demonstrates that GEVO1947 strains transformed with pGV1875 produced up to 1.1 g/L isobutanol in 24 hours. GEVO2087 (transformant #10) produced 1.1 g/L isobutanol in 24 hours, with a volumetric productivity of 0.044 g/L/h, a specific activity of 0.001 g L/h/OD, and a yield of 1.6%.

### Example 36

### Comparison of GEVO2087 and GEVO2072 Isobutanol Production

[0408] The goal of this example was to compare the isobutanol production in GEVO2072 and GEVO2087 in the same shake flask experiment. Aerobic batch cultivations were performed at 30° C. in 250 mL flasks in an orbital shaker at 250 rpm. Yeast cells were grown in YPD medium to mid- to late-log phase. Cells were collected and resuspended in 50 mL of fresh YPD (50 g-glucose L⁻¹) to a final OD₆₀₀ of 0.5-0.8 to initiate fermentations. Samples (2 mL) were taken at 0, 6, 24, 48, and 66.5 hours and cells were removed by centrifugation at ≧14000×g for 10 min in a microcentrifuge. Glucose concentration was measured at each time point on the YSI 2700 Select (YSI Life Sciences, Yellow Springs, Ohio, USA) according to manufacturer's protocols. After 6 hours, 9 mL of 376 g/L glucose was added to each fermentation cultures. After 24 hours, 13.5 ml of 376 g/L glucose was added. After 48 hours, 14 ml of 365 g/L glucose was added. The supernatants from the samples were collected and kept at 4° C. until analysis by Gas Chromatography and/or High Performance Liquid Chromatography as described above.

[0409] The fermentations were initiated with 50 g/L glucose (t=0), and glucose concentrations were monitored throughout the 66.5 hour fermentation experiment using the YSI (data not shown). After 6 hours, the cultures had consumed approximately 25 g/L glucose. Glucose was fed to the cultures at this time point, as well as at 24 and 48 hours. All strains tested consumed glucose at roughly the same rate up to the 48 hour time point. However, after 48 hours, the S. cerevisiae strains continued to consume glucose at a similar rate as previous timepoints (based upon similar slope between 24 and 48 hour measurements and between 48 and 66.5 hour measurements), whereas the K. marxianus strains consumed at a slower rate.

[0410] The concentrations of isobutanol and ethanol for each culture after 0, 6, 24, 48, and 66.5 hours of incubation were averaged for each strain, and the results are summarized in the charts in FIGS. 13a and 13b. After 48 hours, GEVO2087 and GEVO2072 both produced approximately 0.8 g/L isobutanol, compared to 0.2 g/L in the negative control strains, GEVO1947 and GEVO1186 (FIG. 13a). GEVO2087 did not produce anymore isobutanol after 48 hours, whereas GEVO2072 continued to produce isobutanol at a similar rate, reaching a titer of ˜1.4 g/L. All four strains produced ˜90 g/L ethanol in 48 hours (FIG. 13b). The K. marxianus strains failed to produce more ethanol after 48 hours, consistent with the slowdown in growth and glucose consumption after 48 hours.

[0411] Table 9 summarizes the productivity, titers, and yields of isobutanol produced by GEVO1186, GEVO2072, GEVO1947, and GEVO2087 after 48 and 66.5 hours. After 48 hours, the pathway carrying strains, GEVO2072 and GEVO2087, exhibited similar productivities (0.018 g/L/h and 0.0006 g/L/h/OD) and yields (˜1.1%). These values were generally 2-4 times greater than their counterparts that lacked the pathway, GEVO1186 and GEVO1947. After 66.5 hours, the productivities, titer, and yield values of GEVO2087 were lower than at the 48 hour time point, whereas GEVO2072 had the highest values observed during this experiment (specific productivity=0.0006 g/L/h/OD, titer=1.3 g/L, and yield=1.3%).

TABLE 9
Productivity, Titer, and Yield at 48 h and 66.5 h

| | | |
|---|---|---|
| Specific | Isobutanol | |
| Productivity | Titer | Yield |
| [g/L/h/OD] | [g/L] | % |

48 hours

| | | | |
|---|---|---|---|
| GEVO1186 | 0.0002 ± 0.0000 | 0.2 ± 0.02 | 0.2 ± 0.02% |
| GEVO2072 | 0.0006 ± 0.0001 | 0.8 ± 0.10 | 1.1 ± 0.12% |
| GEVO1947 | 0.0003 ± 0.0000 | 0.2 ± 0.00 | 0.3 ± 0.00% |
| GEVO2087 | 0.0006 ± 0.0000 | 0.8 ± 0.03 | 1 ± 0.03% |

66.5 hours

| | | | |
|---|---|---|---|
| GEVO1186 | 0.0002 ± 0.0000 | 0.2 ± 0.02 | 0.2 ± 0.02% |
| GEVO2072 | 0.0006 ± 0.0000 | 1.3 ± 0.12 | 1.3 ± 0.11% |
| GEVO1947 | 0.0002 ± 0.0000 | 0.2 ± 0.02 | 0.3 ± 0.03% |
| GEVO2087 | 0.0004 ± 0.0001 | 0.6 ± 0.14 | 0.8 ± 0.18% |

### Example 37

### Introduction of Mitochondrially-Targeted Isobutanol Pathway into Strain Lacking PDC Activity

[0412] A Pdc-K. marxianus strain (GEVO1969) was transformed with a mitochondrially-targeted isobutanol pathway encoded by pGV1875 (SEQ ID NO: 92) to construct GEVO2276 and GEVO2277 (Table 1). Shake flask fermentations were performed and four strains were analyzed (GEVO2087, GEVO1969, GEVO2276, and GEVO2277).

[0413] As shown in FIG. 14, GEVO2277, which contains the entire mitochondrially-targeted pathway (PATHWAY+), but lacks PDC activity (Pdc-) produced approximately 10% the amount of isobutanol as GEVO2087 (PATHWAY+ PDC+) after 24 hours incubation. GEVO2277 produced approximately 4 times more isobutanol after 24 hrs than did GEVO1969 or GEVO2276, neither of which contained B. subtilis BsalsS transcript.

[0414] As discussed above, GEVO2277 produced approximately 10% the isobutanol compared to GEVO2087 after 24 hours incubation, suggesting that PDC activity is required for production of isobutanol (Titer column in Table 10). However, the specific productivity of GEVO2277 was closer to one-third that of GEVO2087, and the yield of GEVO2277 was approximately half of GEVO2087. The difference in relative yields and specific productivities compared to the relative titers reflects the slower growth and glucose consumption of the Pdc-minus GEVO2277.

TABLE 10
Summary of Isobutanol Production after 24 hours Incubation

| | | specific | |
|---|---|---|---|
| | Titer | productivity | |
| | (g/L) | (g/L/h/OD₆₀₀) | yield |
| GEVO2087 | 1.1 | 0.0016 | 2.1% |
| GEVO1969 | 0.03 | 0.0001 | 0.3% |
| GEVO2276 | 0.03 | 0.0001 | 0.4% |
| GEVO2277 | 0.13 | 0.0005 | 1.1% |

[0415] While GEVO2087 produced more isobutanol than the other three metabolites combines, GEVO2277 produced mostly acetoin, as well as greater levels of diacetyl and pyruvate. Generally, the distribution suggests that the pathway is blocked after the conversion of pyruvate to acetolactate, which is catalyzed by the enzyme encoded by B. subtilis BsalsS. Because both GEVO2087 and GEVO2277 are using the native KARI and DHAD enzymes in the mitochondria, neither of the enzyme are likely the bottleneck in the pathway. However, because GEVO2087 contains PDC activity and GEVO2277 does not, this appears to be the activity that is required for production of isobutanol. This suggests that KIVD activity is limiting, and PDC activity is required for the majority of this activity.

### Example 38

### Introduction of B. subtilis BsalsS with MTS and L. lactis LlkivD2 Lacking MTS into Strain Lacking PDC Activity

[0416] In order to eliminate ethanol production and to produce isobutanol, the mitochondrially-targeted pathway was introduced into a Pdc-minus K. marxianus strain (GEVO1969). The resulting strain, GEVO2277, produced 0.13 g/L isobutanol, which was 4-times higher than background. However, GEVO2277 only produced isobutanol at a yield of 1.1%, while its PDC+ counterpart, GEVO2087, produced isobutanol at a yield of 2.1% (see Table 11).

[0417] One possible reason for the reduction in isobutanol yield in the Pdc-minus GEVO2277 strain is the loss of ketoisovalerate decarboxylase (KIVD) activity contributed by PDC. To test this hypothesis, the Pdc-minus GEVO1969 strain was transformed with a plasmid that contained B. subtilis BsalsS with a mitochondrial targeting sequence and L. lactis LlkivD2 lacking a mitochondrial targeting sequence (pGV1990) (SEQ ID NO: 94), or a plasmid that only contained B. subtilis BsalsS with a mitochondrial targeting sequence (pGV2015) (SEQ ID NO: 95).

[0418] As shown in Table 11, pGV1990-GEVO1969 #5 (GEVO 2347) produced approximately 0.3 g/L isobutanol in 24 hours, which was the highest measured isobutanol titer in this experiment, while producing only 0.001 g/L ethanol. pGV2015-GEVO1969 #2 (GEVO2348) produced the second highest isobutanol, approximately 0.15 g/L. pGV1990-GEVO1969 #1 and #4 produced similar isobutanol titers (−0.07-0.09 g/L) as the positive control strain, GEVO2277, which was approximately 3-4× higher than the negative control strain, GEVO1969. pGV2015-GEVO1969 #3 produced less isobutanol than the negative control strain.

TABLE 11
Summary of Isobutanol Production after 24 Hrs Incubation

| | | | Specific | ethanol |
|---|---|---|---|---|
| | isobutanol titer | | productivity | titer |
| | (g/L) | yield | (g/L/h/OD) | (g/L) |
| pGV1990-1 | 0.07 | 0.8% | 0.0003 | 0.001 |
| pGV1990-4 | 0.08 | 1.0% | 0.0003 | 0.000 |
| (GEVO2346) | | | | |
| pGV1990-5 | 0.3 | 3.3% | 0.0013 | 0.001 |
| (GEVO2347) | | | | |
| pGV2015-2 | 0.14 | 1.4% | 0.0004 | 0.005 |
| (GEVO2348) | | | | |
| pGV2015-3 | 0.01 | 0.2% | 0.0001 | 0.019 |
| GEVO1969 | 0.02 | 0.5% | 0.0001 | 0.001 |
| GEVO2277 | 0.08 | 1.0% | 0.0004 | 0.000 |

### Example 39

### Determination of KIVD Activity

[0419] Based upon the qRT-PCR and shake flask fermentation data, three of the transformants were saved and renamed with the following designations: GEVO2346, GEVO2347, and GEVO2348. To determine the ketoisovalerate decarboxylase activity in these three strains, along with several other control strains, KIVD activity assays were performed on whole cell lysates.

[0420] Cells from a saturated 3 mL YPE cultures (incubated overnight at 30° C., 250 RPM) were used to inoculate 25 mL YPD cultures at OD₆₀₀ of 0.3-0.4 in 125 mL metal capped, baffled flasks. The cultures were incubated at 30° C., 250 RPM for 5-6 hours. The cells were collected by centrifugation (5 minutes at 1600×g), and the mass of the pellet was weighed after removal of the supernatant. KIVD Assay buffer (see below for recipe), containing 1 Roche Protease Inhibitor tablet per 5 mL buffer, was added to each pellet to create a 20% (w/v) cell suspension. Cell lysates were prepared by bead beating and the final protein concentration was determined by Bradford assay. The quality of the isolated proteins was verified with a Coomassie Blue Stained gel.

[0421] Ketoisovalerate decarboxylase activity was assessed as follows. A reaction buffer was prepared at a final concentration of 0.05 M NaHPO₄*H₂O, 5 mM MgCl₂*8H₂O, and 1.5 mM Thiamin pyrophosphate chloride. The reaction substrate, α-keto-isovalerate (3-methyl-2-oxobutanoic acid, Acros Organics), was added where appropriate at 30 mM. Lysates were diluted in reaction buffer at a final protein concentration of 0.1 μg/μL. To 1.5 mL tubes, 50 μL of lysate (5 μg of protein) was mixed with 200 μL of reaction buffer with or without substrate. The reactions were incubated at 37° C. for 20 minutes, and the reactions were immediately filtered through a 2 μm filter plate. The filtered samples were diluted 1:10 in water, and 100 μL of the 1:10 dilution was mixed with 100 μL of derivatization reagent in a 0.2 ml thin-wall PCR tubes. Derivatization reagent was prepared by mixing 4 ml of 2,4-Dinitrophenyl Hydrazine (DNPH) in 15 mM in HPLC-grade Acetonitrile with 1 ml 50 mM Citric Acid Buffer, pH 3. The samples were incubated at 70° C. for 30 minutes. The samples were analyzed by HPLC.

[0422] Analysis of ketoisovalerate and isobutyraldehyde, derivatized with DNPH, was performed on a HP-1100 High Performance Liquid Chromatography system equipped with a Hewlett Packard 1200 HPLC stack column (Agilent Eclipse XDB-18, 150×4.0 mm; 5 μm particles [P/N #993967-902] and C18 Guard cartridge). Ketoisovalerate and isobutyraldehyde were detected using an HP-1100 UV detector (360 nm). The column temperature was 50° C. This method was Isocratic with 60% acetonitrile, 1% H₃PO₄ in Milli-Q water. Flow was set at 1.0 mL/min. Injection size was 10 μL and the run time was 10 minutes. KIVD activity is summarized in Table 12. As shown in Table 12, GEVO2347 contained approximately 33% more KIVD activity than did the negative, Pdc-minus control (GEVO1969), which was determined to be a statistically significant difference (t-test, p=0.045). The increase in KIVD activity in GEVO2347 correlates with the increase in isobutanol production, suggesting that cytosolic KIVD activity was limiting for isobutanol production in the Pdc-minus strains.

TABLE 12
KIVD Activity.

| | Genotype | | | | Transformant | Specific KIVD |
|---|---|---|---|---|---|---|
| Strain | PDC | ALS | KIVD | ADH | Designation | activity (U/mg) |
| GEVO1947 | + | − | − | − | N/A | 0.166 ± 0.029 |
| GEVO1969 | − | − | − | − | N/A | 0.061 ± 0.005 |
| GEVO2087 | + | mitochondria | mitochondria | cytosol | N/A | 0.216 ± 0.025 |
| GEVO2277 | − | mitochondria | mitochondria | cytosol | N/A | 0.058 ± 0.003 |
| GEVO2346 | − | mitochondria | cytosol | − | pGV1990 #4 | 0.059 ± 0.005 |
| GEVO2347 | − | mitochondria | cytosol | − | pGV1990 #5 | 0.080 ± 0.010 |
| GEVO2348 | − | mitochondria | − | − | pGV2015 #2 | 0.047 ± 0.007* |

*Only 2 replicates.

### Example 40

### High Total Titer with Mitochondrially Targeted ALS and KIVD in K. marxianus

[0423] GEVO2087 is a modified yeast biocatalyst that contains genes within the chromosome of the biocatalyst which encode a pathway of enzymes that convert pyruvate into isobutanol. When the biocatalyst GEVO2087 was contacted with glucose in a medium suitable for growth of the biocatalyst, at about 30° C., the biocatalyst produced isobutanol from the glucose. An overnight starter culture was started in a 250 mL Erlenmeyer flask with GEVO2087 cells from a freezer stock with a 40 mL volume of YPD medium consisting of 100 g/L glucose, 10 g/L yeast extract, 20 g/L peptone and at a culture OD600 of 0.05 to 0.1. The starter culture was grown for approximately 14 hrs in a 30° C. shaker at 250 rpm. Some of the starter culture was then transferred to a 2000 mL DasGip fermenter vessel containing about 1500 mL of YPD medium containing 150 g/L glucose initially to achieve an initial culture OD600 of about 0.1. The vessel was attached to a computer control system to monitor and control pH at 6.5 through addition of base, temperature at about 30° C., dissolved oxygen, and agitation. Initially, during the cell growth phase, the vessel was agitated with a fixed agitation of 600 rpm using a 10 sL/h air sparge until the OD600 was about 31. Cell growth continued for approximately 14 hrs, after which time, the agitation was decreased to 400 rpm with 10 sL/h airflow. The dissolved oxygen was approximately zero throughout this experiment. Continuous measurement of the fermentor vessel off-gas by GC-MS analysis was performed for oxygen, isobutanol, ethanol, and carbon dioxide throughout the experiment. Samples were aseptically removed from the fermenter vessel throughout the experiment and used to measure OD600, glucose concentration, and isobutanol concentration in the broth. At about 196 h into the experiment, the fermenter whole broth was removed from the fermenter, cells were separated from the broth using centrifugation at about 20° C. an 4000×g in 500 mL centrifuge bottles. The cell pellets were resuspended in fresh YPD medium that contained 150 g/L glucose and returned to the fermenter. A glucose feed of about 600 g/L glucose in DI water was used intermittently during the production phase of the experiment at time points greater than 14 h to maintain glucose concentration in the fermenter of about 100 g/L or above.

[0424] Isobutanol was recovered from this fermentation using methods that are described in US Patent Publication US 20090171129, which is hereby incorporated by reference in its entirety.

[0425] The distillate recovered in the experiment was strongly enriched for isobutanol. Distillate samples were analyzed by GC for isobutanol concentration. Isobutanol production reached a maximum at around 288 hrs with a total titer of about 21.6 g/L.

### Example 41

### Construction and Fermentation of Isobutanol Pathway Strains Derived from S. cerevisiae Using Different Genes for ALS and KIVD and Using Different Mitochondrial Targeting Sequences for Bs_AlsS

[0426] Two independent shake flask fermentations were performed. The first fermentation was performed in order to screen several strains with different mitochondrially targeted isobutanol pathways for isobutanol production, and to compare these strains to GEVO2072. All of the strains, including GEVO2072, have the pathway integrated at the PDC1 locus, the difference between the strains is the combinations of enzymes and mitochondrial targeting sequences used. For each new strain two clones were tested, each in a single shake flask.

[0427] The second fermentation was performed with GEVO2072 and GEVO2119, both of which were run in triplicate.

[0428] In the first fermentation, of the strains tested, two performed equivalent to GEVO2072 in isobutanol titer. These two strains, GEVO2120 and GEVO2121 were both constructed by integration of pGV1877 into GEVO1186, and they differ from GEVO2072 in that they have ARO10 in place of LlkivD. GEVO2122 thru GEVO2126 all produced approximately the same isobutanol titer of 0.5 g/L at 55 hours. GEVO2122 and GEVO2123 were both constructed by integration of pGV1878 into GEVO1186, and this pathway consists of ILV2, kivD, and ADH7. GEVO2124 and GEVO2125 were both constructed by integration of pGV1879 into GEVO1186, and this pathway consists of ILV2, ARO10, and ADH7. GEVO2126 was constructed by integration of pGV1892 into GEVO1186, and this pathway consists of ILV2, LlkivD, and ILV6*. ILV6* is a mutant of ILV6 that is not repressed by valine. The performance of these strains suggests that ALS is critical to the mitochondrial isobutanol pathway in GEVO2072, GEVO2120, and GEVO2121. All strains consumed approximately the same amount of glucose at all time points.

[0429] In the second fermentation, GEVO2072 again performed as expected and produced about 1 g/L of isobutanol by 55 hours. At 55 hours, GEVO2119 made approximately the same amount of isobutanol as GEVO2072, producing 0.94 g/L, and this value is within the error range of GEVO2072. Both strains had similar values for specific productivity and yield. Both strains consumed similar amounts of glucose and reached similar cell densities.

### Example 42

### Integration of a Mitochondrial Isobutanol Pathway into a PDC Minus S. cerevisiae Strain

[0430] To generate a Pdc-S. cerevisiae strain that expresses the mitochondrial isobutanol pathway, the Pdc-strain GEVO1584 was transformed with pGV1874 that was linearized using PvuI. The resulting Ura+ transformants, GEVO2166 and GEV2167, express mitochondrially-targeted ALS and KIVD proteins and a cytosolically expressed ADH7 protein.

[0431] GEVO1584 and the two transformants were grown in YPE to generate biomass before inoculation of YPD cultures at an OD of 1 to perform shake flask fermentations. None of the candidates produced isobutanol above background. None of the transformants produced ethanol above the background level produced by GEVO1584.

[0432] GEVO2166 and GEVO2167 were inoculated at a similar initial OD as GEVO1584 and grew approximately one generation after the transition to glucose, whereas GEVO1584 grew approximately 2 generations. None of the strains consumed all of the glucose in the initial culture (50 g/L). The strains' glucose consumption tracked with growth (e.g. GEVO1584 consumed approximately twice as much glucose and grew to an OD that was double compared to GEVO2166).

[0433] S. cerevisiae PDC minus strain GEVO1584 shows 6 times less KIVD in vitro activity than a K. marxianus Pdc minus strain GEVO1969. When Ll_kivd (codon optimized for E. coli) is overexpressed in these strains KIVD activity is 20-25 times increased compared to the parent strains (Table 13). The low KIVD activity in GEVO1584 provides one explanation why the corresponding mitochondrial isobutanol pathway carrying strain GEVO2302 did not produce isobutanol over background level. Overexpression of cytosolic KIVD in this Pdc-minus pathway strain might improve its productivity as was shown for K. marxianus.

TABLE 13
Specific KIVD activity in K. marxianus and S. cerevisiae Pdc-strains.

| Strain | KIVD over expression | Spec activity [U/mg] |
|---|---|---|
| GEVO1584 | No | 0.08 |
| GEVO2302 | Yes | 2.3 |
| GEVO1969 | No | 0.49 |
| GEVO2542 | Yes | 12.5 |

### Example 43

### Fermentation of a Mitochondrial Isobutanol Pathway Carrying Strain in Batch Fermenters

[0434] A preculture of 80 mL YPD with 50 g/L glucose was inoculated from a single colony and incubated at 250 rpm, 30° C. for 24 hours. The preculture was transferred to 2 fernbach flasks with 1000 mL YPD with 50 g/L glucose and incubated for 14 hours at 30° C. The starting OD600 of the fernbach flasks was 0.05 and the cultures were harvested at an OD600 of 4.4. The cultures were centrifuged and resuspended as a concentrate. Dasgip 300 mL fermenter vessels with 200 mL YPD+150 g/L glucose were inoculated with the concentrate to a starting OD600 of 5-6. The fermenters were run at a temperature of 30° C. The pH was controlled at 5.5 with 2N KOH and the air flow rate was 2.5 sL/h. The starting agitation was 400 rpm and the agitation was used to control the dissolved oxygen at 5%. One of the fermentation vessels (Vessel 5) was switched to anaerobic by sparging with nitrogen at 25 hours. The results of the fermentations are summarized in Table 14.

TABLE 14
Titer, yield and productivity reached in fermentations of GEVO2062.

| | | Vessel | Vessel | Vessel | Vessel |
|---|---|---|---|---|---|
| | | 5 | 6 | 7 | 8 |
| Max Titer | g I-BuOH/L | 1.93 | 2.73 | 2.34 | 2.49 |
| Yield | % theor. I-BuOH | 1.5% | 2.3% | 1.9% | 2.0% |
| Productivity | g I-BuOH/L/hr | 0.03 | 0.04 | 0.04 | 0.04 |
| Specific | g I-BuOH/OD/L/hr | 0.0019 | 0.0032 | 0.0027 | 0.0028 |
| Productivity | | | | | |

[0435] The foregoing detailed description has been given for clearness of understanding only and no unnecessary limitations should be understood there from as modifications will be obvious to those skilled in the art.

[0436] While the invention has been described in connection with specific embodiments thereof, it will be understood that it is capable of further modifications and this application is intended to cover any variations, uses, or adaptations of the invention following, in general, the principles of the invention and including such departures from the present disclosure as come within known or customary practice within the art to which the invention pertains and as may be applied to the essential features hereinbefore set forth and as follows in the scope of the appended claims.

[0437] The disclosures, including the claims, figures and/or drawings, of each and every patent, patent application, and publication cited herein are hereby incorporated herein by reference in their entireties.

The application's sequence listing, which the Patent Office published only in electronic form, follows.

SEQUENCE LISTING (165 sequences)

SEQ ID NO: 1 - DNA, 10846 bp, Artificial Sequence
  Plasmid pGV1773
tagaaaaactcatcgagcatcaaatgaaactgcaatttattcatatcaggattatcaataccatatttttgaaaaagccgtttctgtaatgaaggagaaaactcaccgaggcagttccataggatggcaagatcctggtatcggtctgcgattccgactcgtccaacatcaatacaacctattaatttcccctcgtcaaaaataaggttatcaagtgagaaatcaccatgagtgacgactgaatccggtgagaatggcaaaagtttatgcatttctttccagacttgttcaacaggccagccattacgctcgtcatcaaaatcactcgcatcaaccaaaccgttattcattcgtgattgcgcctgagcgaggcgaaatacgcgatcgctgttaaaaggacaattacaaacaggaatcgagtgcaaccggcgcaggaacactgccagcgcatcaacaatattttcacctgaatcaggatattcttctaatacctggaacgctgtttttccggggatcgcagtggtgagtaaccatgcatcatcaggagtacggataaaatgcttgatggtcggaagtggcataaattccgtcagccagtttagtctgaccatctcatctgtaacatcattggcaacgctacctttgccatgtttcagaaacaactctggcgcatcgggcttcccatacaagcgatagattgtcgcacctgattgcccgacattatcgcgagcccatttatacccatataaatcagcatccatgttggaatttaatcgcggcctcgacgtttcccgttgaatatggctcatattcttcctttttcaatattattgaagcatttatcagggttattgtctcatgagcggatacatatttgaatgtatttagaaaaataaacaaataggggtcagtgttacaaccaattaaccaattctgaacattatcgcgagcccatttatacctgaatatggctcataacaccccttgtttgcctggcggcagtagcgcggtggtcccacctgaccccatgccgaactcagaagtgaaacgccgtagcgccgatggtagtgtggggactccccatgcgagagtagggaactgccaggcatcaaataaaacgaaaggctcagtcgaaagactgggcctttcgcccgggctaattagggggtgtcgcccttattcgactctatagtgaagttcctattctctagaaagtataggaacttctgaagtggggaagcaaggcagaaactaacttcttcttcatgtaataaacacaccccgcgtttatttacctatctctaaacttcaacaccttatatcataactaatatttcttgagataagcacactgcacccataccttccttaaaaacgtagcttccagtttttggtggttccggcttccttcccgattccgcccgctaaacgcatatttttgttgcctggtggcatttgcaaaatgcataacctatgcatttaaaagattatgtatgctcttctgacttttcgtgtgatgaggctcgtggaaaaaatgaataatttatgaatttgagaacaattttgtgttgttacggtattttactatggaataatcaatcaattgaggattttatgcaaatatcgtttgaatatttttccgaccctttgagtacttttcttcataattgcataatattgtccgctgcccctttttctgttagacggtgtcttgatctacttgctatcgttcaacaccaccttattttctaactattttttttttagctcatttgaatcagcttatggtgatggcacatttttgcataaacctagctgtcctcgttgaacataggaaaaaaaaatatataaacaaggctctttcactctccttgcaatcagatttgggtttgttccctttattttcatatttcttgtcatattcctttctcaattattattttctactcataacctcacgcaaaataacacagtcaaatcaatcaaagtcgacatgttgactaaagctacaaaagagcagaaatcattggtgaaaaataggggtgcagaacttgttgtggactgtttggtagaacagggcgtaacacatgtttttggtatcccaggtgcaaaaatcgacgccgtgtttgatgcattacaagacaagggtccagaaattattgttgctagacatgagcaaaatgccgcatttatggcgcaagctgtaggtaggcttacaggtaaacctggtgttgtcctagttacgtctggcccaggagcctccaatttagcaactggtctattgacagctaatactgagggagatcctgtagttgcgttagccggtaatgtaattagagctgataggcttaagagaactcaccagtctctagacaacgctgctttattccaaccgatcaccaagtactcagtagaggtacaagacgtaaagaatatacctgaagctgtgacaaacgcatttcgtatagcttctgctggtcaggctggtgccgcgtttgtttcttttcctcaagacgttgtcaatgaagtgaccaatactaaaaacgttagagcggttgcagcccctaaactaggtccagccgcagacgacgcaattagcgctgcaattgctaaaattcagacggcgaaactaccagtagtccttgtcggtatgaagggcggaagaccagaagcaataaaagctgttcgtaagttattgaagaaagtccaattacctttcgttgagacttaccaagcagcaggtactttatctagagatttagaggatcagtattttggaaggataggtctatttagaaaccaaccaggagatttactattagaacaagctgatgttgtacttactatcggttatgatcctatagagtatgacccaaagttttggaacataaatggggatagaacaattatacatctagacgagataatcgccgacatcgatcacgcttatcaaccagatttagaactaatcggagatatcccgtcaacaatcaatcatattgaacatgatgctgtaaaggttgagttcgctgaacgtgagcagaaaatcttatctgatctaaagcaatatatgcatgagggtgaacaagttccagcagactggaaatctgaccgtgcacatcctttggaaatcgttaaggaactaagaaatgcggtcgatgatcatgtgactgttacatgtgatatcggttcacatgcaatttggatgtcacgttattttaggagctacgaaccattaactttaatgatatctaacgggatgcaaactctgggggttgcacttccttgggctattggcgctagtttagttaagcccggtgagaaggtggtatcggtatcaggtgatggtggctttctgttttcggctatggaattagaaactgcagtccgtttaaaagctcccattgtgcatattgtctggaatgattctacttacgacatggttgcttttcaacagttgaagaaatacaatagaacttcggctgtagactttggtaacatcgatattgtgaaatatgctgagtcttttggcgcaacaggcctgagggtggaaagtccagatcagttagctgatgtgttgagacaagggatgaatgccgagggaccggtaatcatagatgtgccagttgactactcagacaatattaatttggcttctgataaacttcctaaagagtttggcgagctaatgaagaccaaagccttataaggatccataaaaaacacgctttttcagttcgagtttatcattatcaatactgccatttcaaagaatacgtaaataattaatagtagtgattttcctaactttatttagtcaaaaaattagccttttaattctgctgtaacccgtacatgcccaaaatagggggcgggttacacagaatatataacatcgtaggtgtctgggtgaacagtttattcctggcatccactaaatataatggagcccgctttttaagctggcatccagaaaaaaaaagaatcccagcaccaaaatattgttttcttcaccaaccatcagttcataggtccattctcttagcgcaactacagagaacaggggcacaaacaggcaaaaaacgggcacaacctcaatggagtgatgcaacctgcctggagtaaatgatgacacaaggcaattgacccacgcatgtatctatctcattttcttacaccttctattaccttctgctctctctgatttggaaaaagctgaaaaaaaaggttgaaaccagttccctgaaattattcccctacttgactaataagtatataaagacggtaggtattgattgtaattctgtaaatctatttcttaaacttcttaaattctacttttatagttagtcttttttttagttttaaaacaccaagaacttagtttcgaataaacacacataaacaaacaaaaagcttatgtatactgttggagattatttgttagatagattgcatgaactaggcattgaagaaattttcggagttcccggggattacaatctgcaatttctagaccagattatttcacataaagacatgaaatgggtcggaaatgcaaatgagttaaatgcatcttacatggccgatggttatgccagaaccaaaaaggcggctgctttcttgactaccttcggggtgggtgaattatcggcagttaatggcttggctggatcatacgcagaaaacttgcctgtcgttgaaatcgttggctcgccaacatcaaaagttcaaaatgaaggaaaattcgtccaccacactttggcagatggtgacttcaagcacttcatgaaaatgcatgaacctgtaacggctgccagaactctactaactgctgagaatgcaactgtagagattgatcgtgtcttgagcgctcttttaaaggaaagaaagccagtctatattaacctgccagtagacgtcgcagcggccaaagcagagaagcctagcttaccacttaaaaaggaaaatagtacctcaaacacttcagatcaagagattcttaacaagatccaggaatctttgaaaaacgctaaaaagcccattgttataactggccatgagatcatatcatttggtttggagaaaacagtgacccagttcattagtaagacgaaactgccaataaccactctaaatttcggtaagtcctccgttgatgaagcgttgcctagcttcttgggtatttacaacggcaccttgtcagaacccaatctgaaagaatttgttgaatctgcagactttatattgatgttgggagtaaagttgactgacagctctactggtgcttttacacaccatctgaatgaaaacaagatgatatctcttaatatcgatgaaggtaagatattcaatgaaagaatacagaacttcgacttcgagagtctaatttcttccttactggacttaagtgaaatcgagtataaaggtaagtacattgacaaaaagcaggaagattttgttccgagcaacgcgctacttagtcaagatagattatggcaagctgttgaaaatctgacacaatccaatgagacaattgttgccgaacaaggtacctccttttttggcgcttcttccatcttcctaaagtccaagtctcatttcatagggcagccattgtggggtagcatcggttacacctttcctgctgctctagggtcccaaattgctgataaagaaagtagacatttgttgtttataggagacggatctttacaattgacagttcaagagttaggtttagccatcagagagaagattaatcctatctgcttcataataaacaacgatggctatacagttgagagggaaattcatggacctaatcaatcttataatgatataccaatgtggaattatagcaagttacctgaatcttttggggctaccgaggatcgtgttgtttctaagattgtaagaaccgaaaatgaatttgtttctgttatgaaggaagcacaagcggaccctaacaggatgtactggattgagttaattcttgctaaggagggtgcgccaaaggttctaaagaagatgggtaagttgttcgccgaacaaaacaaatcctaacctaggtcatgtaattagttatgtcacgcttacattcacgccctccccccacatccgctctaaccgaaaaggaaggagttagacaacctgaagtctaggtccctatttatttttttatagttatgttagtattaagaacgttatttatatttcaaatttttcttttttttctgtacagacgcgtgtacgcatgtaacattatactgaaaaccttgcttgagaaggttttgggacgctcgaaggctttaatttgcgggtgtacaatatggacttcctcttttctggcaaccaaacccatacatcgggattcctataataccttcgttggtctccctaacatgtaggtggcggaggggagatatacaatagaacagataccagacaagacataatgggctaaacaagactacaccaattacactgcctcattgatggtggtacataacgaactaatactgtagccctagacttgatagccatcatcatatcgaagtttcactaccctttttccatttgccatctattgaagtaataataggcgcatgcaacttcttttctttttttttcttttctctctcccccgttgttgtctcaccatatccgcaatgacaaaaaaatgatggaagacactaaaggaaaaaattaacgacaaagacagcaccaacagatgtcgttgttccagagctgatgaggggtatctcgaagcacacgaaactttttccttccttcattcacgcacactactctctaatgagcaacggtatacggccttccttccagttacttgaatttgaaataaaaaaaagtttgctgtcttgctatcaagtataaatagacctgcaattattaatcttttgtttcctcgtcattgttctcgttccctttcttccttgtttctttttctgcacaatatttcaagctataccaagcatacaatcaactatctcatatacacatatgttatatccagagaaattccaaggcattggtatctccaacgcaaaggattggaagcatcctaaacttgttagtttcgaccccaaacctttcggtgaccatgacgttgatgttgagattgaagcatgtggaatatgtgggagcgattttcatattgcagtaggcaattggggccctgttccggaaaatcaaattttgggtcacgaaattattggtagggtagtgaaggtgggttcaaaatgtcacacgggtgttaagattggtgatagggttggtgtaggtgcccaagcattggcttgtttcgaatgcgaaagatgcaaaagtgataacgaacaatactgtaccaacgatcatgttctaacaatgtggactccttacaaagatggatacatatctcaaggtggatttgcatcacatgttagattgcatgagcattttgcaattcaaattccggagaatatcccatcacctttggctgcaccattattgtgtgggggaataacagtgtttagtcctttattgagaaacggttgtggacctggtaagcgtgtggggattgttggcataggtggtattggtcacatggggatattactagctaaggccatgggagccgaagtttatgcgttcagtagaggacactccaagcgtgaagacagtatgaagttaggggcggaccattatattgccatgttggaggataaaggctggaccgaacaatattcaaatgctcttgatctgttagttgtgtgtagttcttctcttagtaaagttaattttgactcgattgtgaaaataatgaagattggcggctccattgtttccattgctgctccagaagttaacgagaagctggtactaaaaccactgggtctgatgggggtatctatctcatcttctgctatcggttcaagaaaagaaatagaacagctattaaagctagtcagcgagaaaaatgtgaagatttgggtagagaagctacccataagcgaggagggtgtatctcacgcatttacgagaatggaatccggagatgttaagtacaggtttacacttgtagactatgacaagaaattccataagtgagcggccgcataacaatactgacagtactaaataattgcctacttggcttcacatacgttgcatacgtcgatatagataataatgataatgacagcaggattatcgtaatacgtaatagttgaaaatctcaaaaatgtgtgggtcattacgtaaataatgataggaatgggattcttctatttttcctttttccattctagcagccgtcgggaaaacgtggcatcctctctttcgggctcaattggagtcacgctgccgtgagcatcctctctttccatatctaacaactgagcacgtaaccaatggaaaagcatgagcttagcgttgctccaaaaaagtattggatggttaataccatttgtctgttctcttctgactttgactcctcaaaaaaaaaaaatctacaatcaacagatcgcttcaattacgccctcacaaaaacttttttccttcttcttcgcccacgttaaattttatccctcatgttgtctaacggatttctgcacttgatttattataaaaagacaaagacataatacttctctatcaatttcagttattgttcttccttgcgttattcttctgttcttctttttcttttgtcatatataaccataaccaagtaatacatattcaaactcgagatgtccaaagctacttataaagaaagggctgcaacccatccatccccagtggcagctaaactgtttaacataatgcacgaaaaacaaactaacttatgcgcatcattagatgtaagaactactaaagagctactggagttggttgaggctttaggtccaaaaatttgtttgttgaagacacatgttgacatattaacagatttttctatggagggtaccgttaagcctctgaaagcgttaagcgcgaaatataactttcttttatttgaagaccgtaagtttgctgatattggaaatactgttaagttgcaatatagcgcaggagtttatagaattgccgaatgggctgacattacgaatgcccacggtgttgtaggtcctggcattgtgtctggattgaaacaagcggcagaggaagtgactaaggaaccaagaggtttactaatgctggcggaattatcttgcaaaggctctctagccaccggtgaatatacaaaaggtactgtggatattgcaaagtctgataaggacttcgtaatcggttttattgcacaaagagatatgggaggtcgtgagaattcaaaatgaagtgaagttcctatactttctagagaataggaacttctatagtgagtcgaataagggcgacacaaaatttattctaaatgcataataaatactgataacatcttatagtttgtattatattttgtattatcgttgacatgtataattttgatatcaaaaactgattttccctttattattttcgagatttattttcttaattctctttaacaaactagaaatattgtatatacaaaaaatcataaataatagatgaatagtttaattataggtgttcatcaatcgaaaaagcaacgtatcttatttaaagtgcgttgcttttttctcatttataaggttaaataattctcatatatcaagcaaagtgacaggcgcccttaaatattctgacaaatgctctttccctaaactccccccataaaaaaacccgccgaagcgggtttttacgttatttgcggattaacgattactcgttatcagaaccgcccagggggcccgagcttaagactggccgtcgttttacaacacagaaagagtttgtagaaacgcaaaaaggccatccgtcaggggccttctgcttagtttgatgcctggcagttccctactctcgccttccgcttcctcgctcactgactcgctgcgctcggtcgttcggctgcggcgagcggtatcagctcactcaaaggcggtaatacggttatccacagaatcaggggataacgcaggaaagaacatgtgagcaaaaggccagcaaaaggccaggaaccgtaaaaaggccgcgttgctggcgtttttccataggctccgcccccctgacgagcatcacaaaaatcgacgctcaagtcagaggtggcgaaacccgacaggactataaagataccaggcgtttccccctggaagctccctcgtgcgctctcctgttccgaccctgccgcttaccggatacctgtccgcctttctcccttcgggaagcgtggcgctttctcatagctcacgctgtaggtatctcagttcggtgtaggtcgttcgctccaagctgggctgtgtgcacgaaccccccgttcagcccgaccgctgcgccttatccggtaactatcgtcttgagtccaacccggtaagacacgacttatcgccactggcagcagccactggtaacaggattagcagagcgaggtatgtaggcggtgctacagagttcttgaagtggtgggctaactacggctacactagaagaacagtatttggtatctgcgctctgctgaagccagttaccttcggaaaaagagttggtagctcttgatccggcaaacaaaccaccgctggtagcggtggtttttttgtttgcaagcagcagattacgcgcagaaaaaaaggatctcaagaagatcctttgatcttttctacggggtctgacgctcagtggaacgacgcgcgcgtaactcacgttaagggattttggtcatgagcttgcgccgtcccgtcaagtcagcgtaatgctctgcttt

SEQ ID NO: 2 - DNA, 8916 bp, Artificial Sequence
  Plasmid pGV1774
tagaaaaactcatcgagcatcaaatgaaactgcaatttattcatatcaggattatcaataccatatttttgaaaaagccgtttctgtaatgaaggagaaaactcaccgaggcagttccataggatggcaagatcctggtatcggtctgcgattccgactcgtccaacatcaatacaacctattaatttcccctcgtcaaaaataaggttatcaagtgagaaatcaccatgagtgacgactgaatccggtgagaatggcaaaagtttatgcatttctttccagacttgttcaacaggccagccattacgctcgtcatcaaaatcactcgcatcaaccaaaccgttattcattcgtgattgcgcctgagcgaggcgaaatacgcgatcgctgttaaaaggacaattacaaacaggaatcgagtgcaaccggcgcaggaacactgccagcgcatcaacaatattttcacctgaatcaggatattcttctaatacctggaacgctgtttttccggggatcgcagtggtgagtaaccatgcatcatcaggagtacggataaaatgcttgatggtcggaagtggcataaattccgtcagccagtttagtctgaccatctcatctgtaacatcattggcaacgctacctttgccatgtttcagaaacaactctggcgcatcgggcttcccatacaagcgatagattgtcgcacctgattgcccgacattatcgcgagcccatttatacccatataaatcagcatccatgttggaatttaatcgcggcctcgacgtttcccgttgaatatggctcatattcttcctttttcaatattattgaagcatttatcagggttattgtctcatgagcggatacatatttgaatgtatttagaaaaataaacaaataggggtcagtgttacaaccaattaaccaattctgaacattatcgcgagcccatttatacctgaatatggctcataacaccccttgtttgcctggcggcagtagcgcggtggtcccacctgaccccatgccgaactcagaagtgaaacgccgtagcgccgatggtagtgtggggactccccatgcgagagtagggaactgccaggcatcaaataaaacgaaaggctcagtcgaaagactgggcctttcgcccgggctaattagggggtgtcgcccttattcgactctatagtgaagttcctattctctagaaagtataggaacttctgaagtggggctagccacgaaaaacaaactaacttatgcgcatcattagatgtaagaactactaaagagctactggagttggttgaggctttaggtccaaaaatttgtttgttgaagacacatgttgacatattaacagatttttctatggagggtaccgttaagcctctgaaagcgttaagcgcgaaatataactttcttttatttgaagaccgtaagtttgctgatattggaaatactgttaagttgcaatatagcgcaggagtttatagaattgccgaatgggctgacattacgaatgcccacggtgttgtaggtcctggcattgtgtctggattgaaacaagcggcagaggaagtgactaaggaaccaagaggtttactaatgctggcggaattatcttgcaaaggctctctagccaccggtgaatatacaaaaggtactgtggatattgcaaagtctgataaggacttcgtaatcggttttattgcacaaagagatatgggaggtcgtgacgagggctacgattggttaattatgacaccaggcgtaggattagatgacaaaggcgatgcgttaggccaacagtatcgtacagtcgatgatgtcgtaagtaccggttctgatatcattattgtcgggagaggtttatttgccaagggccgtgatgcgaaagtggagggggaaagatataggaaggcaggttgggaggcttacttgagaagatgtggtcagcagaattaagcggccgcataacaatactgacagtactaaataattgcctacttggcttcacatacgttgcatacgtcgatatagataataatgataatgacagcaggattatcgtaatacgtaatagttgaaaatctcaaaaatgtgtgggtcattacgtaaataatgataggaatgggattcttctatttttcctttttccattctagcagccgtcgggaaaacgtggcatcctctctttcgggctcaattggagtcacgctgccgtgagcatcctctctttccatatctaacaactgagcacgtaaccaatggaaaagcatgagcttagcgttgctccaaaaaagtattggatggttaataccatttgtctgttctcttctgactttgactcctcaaaaaaaaaaaatctacaatcaacagatcgcttcaattacgccctcacaaaaacttttttccttcttcttcgcccacgttaaattttatccctcatgttgtctaacggatttctgcacttgatttattataaaaagacaaagacataatacttctctatcaatttcagttattgttcttccttgcgttattcttctgttcttctttttcttttgtcatatataaccataaccaagtaatacatattcaaactcgagatggatacttaccgttacatcgggggtgatacgtacagatatataggtggtgggctcgagatggccaactattttaacacattaaatttgagacaacaattggctcaactgggtaagtgcagatttatgggaagggacgagtttgctgatggtgcttcttatctgcaaggaaagaaagtagtaattgttggctgcggtgctcagggtctaaaccaaggtttaaacatgagagattcaggtctggatatttcgtatgcattgaggaaagaggcaattgcagaaaagagggcctcctggcgtaaagcgacggaaaatgggttcaaagttggtacttacgaagaactgatccctcaggcagatttagtgattaacctaacaccagataagcaacactcagacgtagtaagaacagttcaaccgctgatgaaggatggggcagctttaggttactctcatggctttaatatcgttgaagtgggcgagcagatcagaaaagatataacagtcgtaatggttgcaccaaagtgcccaggtacggaagtcagagaggagtacaagaggggttttggtgtacctacattgatcgccgtacatcctgaaaatgaccccaaaggtgaaggtatggcaattgcgaaggcatgggcagccgcaaccggaggtcatagagcgggtgtgttagagagttctttcgtagctgaggtcaagagtgacttaatgggtgaacaaaccattctgtgcggaatgttgcaggcagggtctttactatgctttgataaattggtcgaagagggtacagatcctgcctatgctgaaaagttgatacaatttggttgggagacaatcaccgaggcacttaaacaaggtggcataacattgatgatggatagactttcaaatccggccaagctaagagcctacgccttatctgagcaactaaaagagatcatggcaccattattccaaaagcacatggacgatattatctccggtgagttttcctcaggaatgatggcagattgggcaaacgatgataaaaagttattgacgtggagagaagaaaccggcaagacggcattcgagacagccccacaatacgaaggtaaaattggtgaacaagaatactttgataagggagtattgatgatagctatggtgaaggcaggggtagaacttgcattcgaaactatggttgactccggtatcattgaagaatctgcatactatgagtctttgcatgaattgcctttgatagcaaatactattgcaagaaaaagactttacgagatgaatgttgtcatatcagacactgcagaatatggtaattacttatttagctacgcatgtgtcccgttgttaaagcccttcatggccgagttacaacctggtgatttggggaaggctattccggaaggagcggttgacaatggccaactgagagacgtaaatgaagctattcgttcacatgctatagaacaggtgggtaaaaagctgagaggatatatgaccgatatgaaaagaattgcagtggcaggatgaagatcttgtttaaagattacggatatttaacttacttagaataatgccatttttttgagttataataatcctacgttagtgtgagcgggatttaaactgtgaggaccttaatacattcagacacttctgcggtatcaccctacttattcccttcgagattatatctaggaacccatcaggttggtggaagattacccgttctaagacttttcagcttcctctattgatgttacacctggacaccccttttctggcatccagtttttaatcttcagtggcatgtgagattctccgaaattaattaaagcaatcacacaattctctcggataccacctcggttgaaactgacaggtggtttgttacgcatgctaatgcaaaggagcctatatacctttggctcggctgctgtaacagggaatataaagggcagcataatttaggagtttagtgaacttgcaacatttactattttcccttcttacgtaaatatttttctttttaattctaaatcaatctttttcaattttttgtttgtattcttttcttgcttaaatctataactacaaaaaacacatacataaactaaaagtcgacatgtacccatacgatgttccagattacgcaggtggtggtgtcgacatgcctaaatacagatcagctacgactacacacggtagaaatatggccggagccagggccctatggagagccaccggcatgacagatgcagattttggtaaacctataattgctgtagttaactcttttacacagtttgttccaggtcatgtacatctaagagacttgggcaaattggtggcagaacaaatcgaggctgctggtggtgttgcaaaagaatttaacactattgccgtagacgacggcattgcgatgggtcatggcggtatgctttattcgctaccctccagagaattaattgcagacagcgttgaatatatggtaaatgcccactgcgcagatgccatggtttgcatttccaattgtgacaaaatcacgccgggcatgttgatggcgtcattgagactaaatattcctgtgatcttcgttagcggaggtcccatggaagccgggaaaactaaactttccgatcagataatcaagttagacttggtcgatgccatgatccagggtgcggaccccaaagtaagcgactctcaatccgatcaagttgaaagatccgcatgtccaacttgcgggagttgctctgggatgttcacggcgaactctatgaattgcctaacagaggccctgggcctgtcacaacctggcaacggttcgcttttagcaactcatgctgatagaaagcaattatttctaaatgctggtaaaagaatcgttgaattaacaaaaagatattacgaacaaaacgatgaatctgcactgccaaggaacattgcttcaaaggccgctttcgaaaacgctatgacattggatattgcaatgggtggaagcacaaatactgtccttcatctactggcggctgctcaagaagcagaaattgatttcacaatgagcgatatcgacaagctatcacgtaaggtcccgcagctgtgtaaagtggcaccgtctactcaaaaataccacatggaagatgtccatcgtgctggaggcgttatcggaatcttgggggagttggacagggccggtctattaaacagagatgttaagaacgtgctaggtctaactttgcctcaaaccttagagcagtacgacgttatgttaactcaagatgacgcagtcaaaaacatgttcagagcggggccagctggaataaggactacccaagcgttctcgcaagattgcagatgggatactctggacgatgatagagctaacggttgcataagatcactagagcatgcttactcgaaagatggaggtttagctgttttatacggtaattttgccgaaaacggatgtatagtgaagaccgctggggttgatgattcaattctaaaattcactgggccagccaaggtatacgagtcacaagatgatgctgttgaagccatcttaggtgggaaagtggtggcaggggacgtggtggtaataagatatgaaggtccaaagggtggtccaggtatgcaagaaatgctgtaccctacttctttccttaaatctatgggtttaggcaaggcttgtgctcttataaccgatggtagattttctggaggtacatcaggcctttccataggacatgttagccccgaagctgcctcaggtggtagtattggcttaatcgaggatggtgacttaattgctattgacattcctaacaggggtattcaactacaggttagcgatgcagaattagccgctagaagagaggcacaagatgcgagaggcgataaagcatggacacctaagaacagggagagacaagtgagctttgccctgagagcttatgcctcgctggcgacgagcgcagacaaaggagccgtaagagataaatcaaaattgggtggttagggatccgcgatttaatctctaattattagttaaagttttataagcatttttatgtaacgaaaaataaattggttcatattattactgcactgtcacttaccatggaaagaccagacaagaagttgccgacagtctgttgaattggcctggttaggcttaagtctgggtccgcttctttacaaatttggagaatttctcttaaacgatatgtatattcttttcgttggaaaagatgtcttccaaaaaaaaaaccgatgaattagtggaaccaaggaaaaaaaaagaggtatccttgattaaggaacactgtttaaacagtgtggtttccaaaaccctgaaactgcattagtgtaatagaagactagacacctcgatacaaataatggttactcaattcaaaactgccagcgaattcgactctgcaattgctcaagacaagctagttgtcgtagatttctacgccacttggtgcggtccatgtaaaatgattgctccaatgattgaaaaattctctgaacaatacccacaagctgatttctataaattggatgtcgatgaattgggtgatgttgcacaaaagaatgaagtttccgctatgccaactttgcttctattcaagaacggtaaggaagttgcaaaggttgttggtgccaacccagcggctattaagcaagccattgctgctaatgcttaaactcacccaatgaccgatatattgtgtttctatactgtgtttgttatatatagtttacctttaagcttaaaatgaagtgaagttcctatactttctagagaataggaacttctatagtgagtcgaataagggcgacacaaaatttattctaaatgcataataaatactgataacatcttatagtttgtattatattttgtattatcgttgacatgtataattttgatatcaaaaactgattttccctttattattttcgagatttattttcttaattctctttaacaaactagaaatattgtatatacaaaaaatcataaataatagatgaatagtttaattataggtgttcatcaatcgaaaaagcaacgtatcttatttaaagtgcgttgcttttttctcatttataaggttaaataattctcatatatcaagcaaagtgacaggcgcccttaaatattctgacaaatgctctttccctaaactccccccataaaaaaacccgccgaagcgggtttttacgttatttgcggattaacgattactcgttatcagaaccgcccagggggcccgagcttaagactggccgtcgttttacaacacagaaagagtttgtagaaacgcaaaaaggccatccgtcaggggccttctgcttagtttgatgcctggcagttccctactctcgccttccgcttcctcgctcactgactcgctgcgctcggtcgttcggctgcggcgagcggtatcagctcactcaaaggcggtaatacggttatccacagaatcaggggataacgcaggaaagaacatgtgagcaaaaggccagcaaaaggccaggaaccgtaaaaaggccgcgttgctggcgtttttccataggctccgcccccctgacgagcatcacaaaaatcgacgctcaagtcagaggtggcgaaacccgacaggactataaagataccaggcgtttccccctggaagctccctcgtgcgctctcctgttccgaccctgccgcttaccggatacctgtccgcctttctcccttcgggaagcgtggcgctttctcatagctcacgctgtaggtatctcagttcggtgtaggtcgttcgctccaagctgggctgtgtgcacgaaccccccgttcagcccgaccgctgcgccttatccggtaactatcgtcttgagtccaacccggtaagacacgacttatcgccactggcagcagccactggtaacaggattagcagagcgaggtatgtaggcggtgctacagagttcttgaagtggtgggctaactacggctacactagaagaacagtatttggtatctgcgctctgctgaagccagttaccttcggaaaaagagttggtagctcttgatccggcaaacaaaccaccgctggtagcggtggtttttttgtttgcaagcagcagattacgcgcagaaaaaaaggatctcaagaagatcctttgatcttttctacggggtctgacgctcagtggaacgacgcgcgcgtaactcacgttaagggattttggtcatgagcttgcgccgtcccgtcaagtcagcgtaatgctctgcttt

SEQ ID NO: 3 - DNA, 8572 bp, Artificial Sequence
  PLasmid pGV1810
tagaaaaactcatcgagcatcaaatgaaactgcaatttattcatatcaggattatcaataccatatttttgaaaaagccgtttctgtaatgaaggagaaaactcaccgaggcagttccataggatggcaagatcctggtatcggtctgcgattccgactcgtccaacatcaatacaacctattaatttcccctcgtcaaaaataaggttatcaagtgagaaatcaccatgagtgacgactgaatccggtgagaatggcaaaagtttatgcatttctttccagacttgttcaacaggccagccattacgctcgtcatcaaaatcactcgcatcaaccaaaccgttattcattcgtgattgcgcctgagcgaggcgaaatacgcgatcgctgttaaaaggacaattacaaacaggaatcgagtgcaaccggcgcaggaacactgccagcgcatcaacaatattttcacctgaatcaggatattcttctaatacctggaacgctgtttttccggggatcgcagtggtgagtaaccatgcatcatcaggagtacggataaaatgcttgatggtcggaagtggcataaattccgtcagccagtttagtctgaccatctcatctgtaacatcattggcaacgctacctttgccatgtttcagaaacaactctggcgcatcgggcttcccatacaagcgatagattgtcgcacctgattgcccgacattatcgcgagcccatttatacccatataaatcagcatccatgttggaatttaatcgcggcctcgacgtttcccgttgaatatggctcatattcttcctttttcaatattattgaagcatttatcagggttattgtctcatgagcggatacatatttgaatgtatttagaaaaataaacaaataggggtcagtgttacaaccaattaaccaattctgaacattatcgcgagcccatttatacctgaatatggctcataacaccccttgtttgcctggcggcagtagcgcggtggtcccacctgaccccatgccgaactcagaagtgaaacgccgtagcgccgatggtagtgtggggactccccatgcgagagtagggaactgccaggcatcaaataaaacgaaaggctcagtcgaaagactgggcctttcgcccgggctaattagggggtgtcgcccttattcgactctatagtgaagttcctattctctagaaagtataggaacttctgaagtggggctagccacgaaaaacaaactaacttatgcgcatcattagatgtaagaactactaaagagctactggagttggttgaggctttaggtccaaaaatttgtttgttgaagacacatgttgacatattaacagatttttctatggagggtaccgttaagcctctgaaagcgttaagcgcgaaatataactttcttttatttgaagaccgtaagtttgctgatattggaaatactgttaagttgcaatatagcgcaggagtttatagaattgccgaatgggctgacattacgaatgcccacggtgttgtaggtcctggcattgtgtctggattgaaacaagcggcagaggaagtgactaaggaaccaagaggtttactaatgctggcggaattatcttgcaaaggctctctagccaccggtgaatatacaaaaggtactgtggatattgcaaagtctgataaggacttcgtaatcggttttattgcacaaagagatatgggaggtcgtgacgagggctacgattggttaattatgacaccaggcgtaggattagatgacaaaggcgatgcgttaggccaacagtatcgtacagtcgatgatgtcgtaagtaccggttctgatatcattattgtcgggagaggtttatttgccaagggccgtgatgcgaaagtggagggggaaagatataggaaggcaggttgggaggcttacttgagaagatgtggtcagcagaattaagcggccgcataacaatactgacagtactaaataattgcctacttggcttcacatacgttgcatacgtcgatatagataataatgataatgacagcaggattatcgtaatacgtaatagttgaaaatctcaaaaatgtgtgggtcattacgtaaataatgataggaatgggattcttctatttttcctttttccattctagcagccgtcgggaaaacgtggcatcctctctttcgggctcaattggagtcacgctgccgtgagcatcctctctttccatatctaacaactgagcacgtaaccaatggaaaagcatgagcttagcgttgctccaaaaaagtattggatggttaataccatttgtctgttctcttctgactttgactcctcaaaaaaaaaaaatctacaatcaacagatcgcttcaattacgccctcacaaaaacttttttccttcttcttcgcccacgttaaattttatccctcatgttgtctaacggatttctgcacttgatttattataaaaagacaaagacataatacttctctatcaatttcagttattgttcttccttgcgttattcttctgttcttctttttcttttgtcatatataaccataaccaagtaatacatattcaaactcgagatgttgagaactcaagccgccagattgatctgcaactcccgtgtcatcactgctaagagaacctttgctttggccacccgtgctgctgcttacagcagaccagctgcccgtttcgttaagccaatgatcactacccgtggtttgaagcaaatcaacttcggtggtactgttgaaaccgtctacgaaagagctgactggccaagagaaaagttgttggactacttcaagaacgacacttttgctttgatcggttacggttcccaaggttacggtcaaggtttgaacttgagagacaacggtttgaacgttatcattggtgtccgtaaagatggtgcttcttggaaggctgccatcgaagacggttgggttccaggcaagaacttgttcactgttgaagatgctatcaagagaggtagttacgttatgaacttgttgtccgatgccgctcaatcagaaacctggcctgctatcaagccattgttgaccaagggtaagactttgtacttctcccacggtttctccccagtcttcaaggacttgactcacgttgaaccaccaaaggacttagatgttatcttggttgctccaaagggttccggtagaactgtcagatctttgttcaaggaaggtcgtggtattaactcttcttacgccgtctggaacgatgtcaccggtaaggctcacgaaaaggcccaagctttggccgttgccattggttccggttacgtttaccaaaccactttcgaaagagaagtcaactctgacttgtacggtgaaagaggttgtttaatgggtggtatccacggtatgttcttggctcaatacgacgtcttgagagaaaacggtcactccccatctgaagctttcaacgaaaccgtcgaagaagctacccaatctctatacccattgatcggtaagtacggtatggattacatgtacgatgcttgttccaccaccgccagaagaggtgctttggactggtacccaatcttcaagaatgctttgaagcctgttttccaagacttgtacgaatctaccaagaacggtaccgaaaccaagagatctttggaattcaactctcaacctgactacagagaaaagctagaaaaggaattagacaccatcagaaacatggaaatctggaaggttggtaaggaagtcagaaagttgagaccagaaaaccaataacctaggatcttgtttaaagattacggatatttaacttacttagaataatgccatttttttgagttataataatcctacgttagtgtgagcgggatttaaactgtgaggaccttaatacattcagacacttctgcggtatcaccctacttattcccttcgagattatatctaggaacccatcaggttggtggaagattacccgttctaagacttttcagcttcctctattgatgttacacctggacaccccttttctggcatccagtttttaatcttcagtggcatgtgagattctccgaaattaattaaagcaatcacacaattctctcggataccacctcggttgaaactgacaggtggtttgttacgcatgctaatgcaaaggagcctatatacctttggctcggctgctgtaacagggaatataaagggcagcataatttaggagtttagtgaacttgcaacatttactattttcccttcttacgtaaatatttttctttttaattctaaatcaatctttttcaattttttgtttgtattcttttcttgcttaaatctataactacaaaaaacacatacataaactaaaagtcgacatgtacccatacgatgttccagattacgcaggtggtggtgtcgacatgcctaaatacagatcagctacgactacacacggtagaaatatggccggagccagggccctatggagagccaccggcatgacagatgcagattttggtaaacctataattgctgtagttaactcttttacacagtttgttccaggtcatgtacatctaagagacttgggcaaattggtggcagaacaaatcgaggctgctggtggtgttgcaaaagaatttaacactattgccgtagacgacggcattgcgatgggtcatggcggtatgctttattcgctaccctccagagaattaattgcagacagcgttgaatatatggtaaatgcccactgcgcagatgccatggtttgcatttccaattgtgacaaaatcacgccgggcatgttgatggcgtcattgagactaaatattcctgtgatcttcgttagcggaggtcccatggaagccgggaaaactaaactttccgatcagataatcaagttagacttggtcgatgccatgatccagggtgcggaccccaaagtaagcgactctcaatccgatcaagttgaaagatccgcatgtccaacttgcgggagttgctctgggatgttcacggcgaactctatgaattgcctaacagaggccctgggcctgtcacaacctggcaacggttcgcttttagcaactcatgctgatagaaagcaattatttctaaatgctggtaaaagaatcgttgaattaacaaaaagatattacgaacaaaacgatgaatctgcactgccaaggaacattgcttcaaaggccgctttcgaaaacgctatgacattggatattgcaatgggtggaagcacaaatactgtccttcatctactggcggctgctcaagaagcagaaattgatttcacaatgagcgatatcgacaagctatcacgtaaggtcccgcagctgtgtaaagtggcaccgtctactcaaaaataccacatggaagatgtccatcgtgctggaggcgttatcggaatcttgggggagttggacagggccggtctattaaacagagatgttaagaacgtgctaggtctaactttgcctcaaaccttagagcagtacgacgttatgttaactcaagatgacgcagtcaaaaacatgttcagagcggggccagctggaataaggactacccaagcgttctcgcaagattgcagatgggatactctggacgatgatagagctaacggttgcataagatcactagagcatgcttactcgaaagatggaggtttagctgttttatacggtaattttgccgaaaacggatgtatagtgaagaccgctggggttgatgattcaattctaaaattcactgggccagccaaggtatacgagtcacaagatgatgctgttgaagccatcttaggtgggaaagtggtggcaggggacgtggtggtaataagatatgaaggtccaaagggtggtccaggtatgcaagaaatgctgtaccctacttctttccttaaatctatgggtttaggcaaggcttgtgctcttataaccgatggtagattttctggaggtacatcaggcctttccataggacatgttagccccgaagctgcctcaggtggtagtattggcttaatcgaggatggtgacttaattgctattgacattcctaacaggggtattcaactacaggttagcgatgcagaattagccgctagaagagaggcacaagatgcgagaggcgataaagcatggacacctaagaacagggagagacaagtgagctttgccctgagagcttatgcctcgctggcgacgagcgcagacaaaggagccgtaagagataaatcaaaattgggtggttagggatccgcgatttaatctctaattattagttaaagttttataagcatttttatgtaacgaaaaataaattggttcatattattactgcactgtcacttaccatggaaagaccagacaagaagttgccgacagtctgttgaattggcctggttaggcttaagtctgggtccgcttctttacaaatttggagaatttctcttaaacgatatgtatattcttttcgttggaaaagatgtcttccaaaaaaaaaaccgatgaattagtggaaccaaggaaaaaaaaagaggtatccttgattaaggaacactgtttaaacagtgtggtttccaaaaccctgaaactgcattagtgtaatagaagactagacacctcgatacaaataatggttactcaattcaaaactgccagcgaattcgactctgcaattgctcaagacaagctagttgtcgtagatttctacgccacttggtgcggtccatgtaaaatgattgctccaatgattgaaaaattctctgaacaatacccacaagctgatttctataaattggatgtcgatgaattgggtgatgttgcacaaaagaatgaagtttccgctatgccaactttgcttctattcaagaacggtaaggaagttgcaaaggttgttggtgccaacccagcggctattaagcaagccattgctgctaatgcttaaactcacccaatgaccgatatattgtgtttctatactgtgtttgttatatatagtttacctttaagcttaaaatgaagtgaagttcctatactttctagagaataggaacttctatagtgagtcgaataagggcgacacaaaatttattctaaatgcataataaatactgataacatcttatagtttgtattatattttgtattatcgttgacatgtataattttgatatcaaaaactgattttccctttattattttcgagatttattttcttaattctctttaacaaactagaaatattgtatatacaaaaaatcataaataatagatgaatagtttaattataggtgttcatcaatcgaaaaagcaacgtatcttatttaaagtgcgttgcttttttctcatttataaggttaaataattctcatatatcaagcaaagtgacaggcgcccttaaatattctgacaaatgctctttccctaaactccccccataaaaaaacccgccgaagcgggtttttacgttatttgcggattaacgattactcgttatcagaaccgcccagggggcccgagcttaagactggccgtcgttttacaacacagaaagagtttgtagaaacgcaaaaaggccatccgtcaggggccttctgcttagtttgatgcctggcagttccctactctcgccttccgcttcctcgctcactgactcgctgcgctcggtcgttcggctgcggcgagcggtatcagctcactcaaaggcggtaatacggttatccacagaatcaggggataacgcaggaaagaacatgtgagcaaaaggccagcaaaaggccaggaaccgtaaaaaggccgcgttgctggcgtttttccataggctccgcccccctgacgagcatcacaaaaatcgacgctcaagtcagaggtggcgaaacccgacaggactataaagataccaggcgtttccccctggaagctccctcgtgcgctctcctgttccgaccctgccgcttaccggatacctgtccgcctttctcccttcgggaagcgtggcgctttctcatagctcacgctgtaggtatctcagttcggtgtaggtcgttcgctccaagctgggctgtgtgcacgaaccccccgttcagcccgaccgctgcgccttatccggtaactatcgtcttgagtccaacccggtaagacacgacttatcgccactggcagcagccactggtaacaggattagcagagcgaggtatgtaggcggtgctacagagttcttgaagtggtgggctaactacggctacactagaagaacagtatttggtatctgcgctctgctgaagccagttaccttcggaaaaagagttggtagctcttgatccggcaaacaaaccaccgctggtagcggtggtttttttgtttgcaagcagcagattacgcgcagaaaaaaaggatctcaagaagatcctttgatcttttctacggggtctgacgctcagtggaacgacgcgcgcgtaactcacgttaagggattttggtcatgagcttgcgccgtcccgtcaagtcagcgtaatgctctgcttt

SEQ ID NO: 4 - DNA, 10661 bp, Artificial Sequence
  Plasmid pGV1811
tagaaaaactcatcgagcatcaaatgaaactgcaatttattcatatcaggattatcaataccatatttttgaaaaagccgtttctgtaatgaaggagaaaactcaccgaggcagttccataggatggcaagatcctggtatcggtctgcgattccgactcgtccaacatcaatacaacctattaatttcccctcgtcaaaaataaggttatcaagtgagaaatcaccatgagtgacgactgaatccggtgagaatggcaaaagtttatgcatttctttccagacttgttcaacaggccagccattacgctcgtcatcaaaatcactcgcatcaaccaaaccgttattcattcgtgattgcgcctgagcgaggcgaaatacgcgatcgctgttaaaaggacaattacaaacaggaatcgagtgcaaccggcgcaggaacactgccagcgcatcaacaatattttcacctgaatcaggatattcttctaatacctggaacgctgtttttccggggatcgcagtggtgagtaaccatgcatcatcaggagtacggataaaatgcttgatggtcggaagtggcataaattccgtcagccagtttagtctgaccatctcatctgtaacatcattggcaacgctacctttgccatgtttcagaaacaactctggcgcatcgggcttcccatacaagcgatagattgtcgcacctgattgcccgacattatcgcgagcccatttatacccatataaatcagcatccatgttggaatttaatcgcggcctcgacgtttcccgttgaatatggctcatattcttcctttttcaatattattgaagcatttatcagggttattgtctcatgagcggatacatatttgaatgtatttagaaaaataaacaaataggggtcagtgttacaaccaattaaccaattctgaacattatcgcgagcccatttatacctgaatatggctcataacaccccttgtttgcctggcggcagtagcgcggtggtcccacctgaccccatgccgaactcagaagtgaaacgccgtagcgccgatggtagtgtggggactccccatgcgagagtagggaactgccaggcatcaaataaaacgaaaggctcagtcgaaagactgggcctttcgcccgggctaattagggggtgtcgcccttattcgactctatagtgaagttcctattctctagaaagtataggaacttctgaagtggggagatctcaccagtaaaacatacgcatacacatacacacatagagcaagcaagcaggctagcaaccaggaaaggctgccagtgactgctactgggtgtctaagaaccgtagggcggattattgttgcggtggttggttgcgggtggttatgcgatggtacggtgcagaatcgtacggtgttggttatggaattagtatgggtatgtgatatgtggtaatatgtgatattgggttattgtgatttggaatactgaatatcgaatatgggatatggaatatggccatggcatggtatggtatgggatgggagtattctattttattttattttattctggttcctgcgtttagggtagggtaggaagaaggtgagtgcttttgtatataagtggagtgtctggatcagttttgtggattgtgaatgttagtttcccctttaatgtatatttgtattatttgcttttgagtactcaataaccaagcacaactactagttttaaaggatccatcctcttaaacagtacaaatcgcaaagaaaagctccacacccaaaccaaataattgcagtcgacatgttgactaaagctacaaaagagcagaaatcattggtgaaaaataggggtgcagaacttgttgtggactgtttggtagaacagggcgtaacacatgtttttggtatcccaggtgcaaaaatcgacgccgtgtttgatgcattacaagacaagggtccagaaattattgttgctagacatgagcaaaatgccgcatttatggcgcaagctgtaggtaggcttacaggtaaacctggtgttgtcctagttacgtctggcccaggagcctccaatttagcaactggtctattgacagctaatactgagggagatcctgtagttgcgttagccggtaatgtaattagagctgataggcttaagagaactcaccagtctctagacaacgctgctttattccaaccgatcaccaagtactcagtagaggtacaagacgtaaagaatatacctgaagctgtgacaaacgcatttcgtatagcttctgctggtcaggctggtgccgcgtttgtttcttttcctcaagacgttgtcaatgaagtgaccaatactaaaaacgttagagcggttgcagcccctaaactaggtccagccgcagacgacgcaattagcgctgcaattgctaaaattcagacggcgaaactaccagtagtccttgtcggtatgaagggcggaagaccagaagcaataaaagctgttcgtaagttattgaagaaagtccaattacctttcgttgagacttaccaagcagcaggtactttatctagagatttagaggatcagtattttggaaggataggtctatttagaaaccaaccaggagatttactattagaacaagctgatgttgtacttactatcggttatgatcctatagagtatgacccaaagttttggaacataaatggggatagaacaattatacatctagacgagataatcgccgacatcgatcacgcttatcaaccagatttagaactaatcggagatatcccgtcaacaatcaatcatattgaacatgatgctgtaaaggttgagttcgctgaacgtgagcagaaaatcttatctgatctaaagcaatatatgcatgagggtgaacaagttccagcagactggaaatctgaccgtgcacatcctttggaaatcgttaaggaactaagaaatgcggtcgatgatcatgtgactgttacatgtgatatcggttcacatgcaatttggatgtcacgttattttaggagctacgaaccattaactttaatgatatctaacgggatgcaaactctgggggttgcacttccttgggctattggcgctagtttagttaagcccggtgagaaggtggtatcggtatcaggtgatggtggctttctgttttcggctatggaattagaaactgcagtccgtttaaaagctcccattgtgcatattgtctggaatgattctacttacgacatggttgcttttcaacagttgaagaaatacaatagaacttcggctgtagactttggtaacatcgatattgtgaaatatgctgagtcttttggcgcaacaggcctgagggtggaaagtccagatcagttagctgatgtgttgagacaagggatgaatgccgagggaccggtaatcatagatgtgccagttgactactcagacaatattaatttggcttctgataaacttcctaaagagtttggcgagctaatgaagaccaaagccttataaggatccataaaaaacacgctttttcagttcgagtttatcattatcaatactgccatttcaaagaatacgtaaataattaatagtagtgattttcctaactttatttagtcaaaaaattagccttttaattctgctgtaacccgtacatgcccaaaatagggggcgggttacacagaatatataacatcgtaggtgtctgggtgaacagtttattcctggcatccactaaatataatggagcccgctttttaagctggcatccagaaaaaaaaagaatcccagcaccaaaatattgttttcttcaccaaccatcagttcataggtccattctcttagcgcaactacagagaacaggggcacaaacaggcaaaaaacgggcacaacctcaatggagtgatgcaacctgcctggagtaaatgatgacacaaggcaattgacccacgcatgtatctatctcattttcttacaccttctattaccttctgctctctctgatttggaaaaagctgaaaaaaaaggttgaaaccagttccctgaaattattcccctacttgactaataagtatataaagacggtaggtattgattgtaattctgtaaatctatttcttaaacttcttaaattctacttttatagttagtcttttttttagttttaaaacaccaagaacttagtttcgaataaacacacataaacaaacaaaaagcttatgtatactgttggagattatttgttagatagattgcatgaactaggcattgaagaaattttcggagttcccggggattacaatctgcaatttctagaccagattatttcacataaagacatgaaatgggtcggaaatgcaaatgagttaaatgcatcttacatggccgatggttatgccagaaccaaaaaggcggctgctttcttgactaccttcggggtgggtgaattatcggcagttaatggcttggctggatcatacgcagaaaacttgcctgtcgttgaaatcgttggctcgccaacatcaaaagttcaaaatgaaggaaaattcgtccaccacactttggcagatggtgacttcaagcacttcatgaaaatgcatgaacctgtaacggctgccagaactctactaactgctgagaatgcaactgtagagattgatcgtgtcttgagcgctcttttaaaggaaagaaagccagtctatattaacctgccagtagacgtcgcagcggccaaagcagagaagcctagcttaccacttaaaaaggaaaatagtacctcaaacacttcagatcaagagattcttaacaagatccaggaatctttgaaaaacgctaaaaagcccattgttataactggccatgagatcatatcatttggtttggagaaaacagtgacccagttcattagtaagacgaaactgccaataaccactctaaatttcggtaagtcctccgttgatgaagcgttgcctagcttcttgggtatttacaacggcaccttgtcagaacccaatctgaaagaatttgttgaatctgcagactttatattgatgttgggagtaaagttgactgacagctctactggtgcttttacacaccatctgaatgaaaacaagatgatatctcttaatatcgatgaaggtaagatattcaatgaaagaatacagaacttcgacttcgagagtctaatttcttccttactggacttaagtgaaatcgagtataaaggtaagtacattgacaaaaagcaggaagattttgttccgagcaacgcgctacttagtcaagatagattatggcaagctgttgaaaatctgacacaatccaatgagacaattgttgccgaacaaggtacctccttttttggcgcttcttccatcttcctaaagtccaagtctcatttcatagggcagccattgtggggtagcatcggttacacctttcctgctgctctagggtcccaaattgctgataaagaaagtagacatttgttgtttataggagacggatctttacaattgacagttcaagagttaggtttagccatcagagagaagattaatcctatctgcttcataataaacaacgatggctatacagttgagagggaaattcatggacctaatcaatcttataatgatataccaatgtggaattatagcaagttacctgaatcttttggggctaccgaggatcgtgttgtttctaagattgtaagaaccgaaaatgaatttgtttctgttatgaaggaagcacaagcggaccctaacaggatgtactggattgagttaattcttgctaaggagggtgcgccaaaggttctaaagaagatgggtaagttgttcgccgaacaaaacaaatcctaacctaggtcatgtaattagttatgtcacgcttacattcacgccctccccccacatccgctctaaccgaaaaggaaggagttagacaacctgaagtctaggtccctatttatttttttatagttatgttagtattaagaacgttatttatatttcaaatttttcttttttttctgtacagacgcgtgtacgcatgtaacattatactgaaaaccttgcttgagaaggttttgggacgctcgaaggctttaatttgcgggtgtacaatatggacttcctcttttctggcaaccaaacccatacatcgggattcctataataccttcgttggtctccctaacatgtaggtggcggaggggagatatacaatagaacagataccagacaagacataatgggctaaacaagactacaccaattacactgcctcattgatggtggtacataacgaactaatactgtagccctagacttgatagccatcatcatatcgaagtttcactaccctttttccatttgccatctattgaagtaataataggcgcatgcaacttcttttctttttttttcttttctctctcccccgttgttgtctcaccatatccgcaatgacaaaaaaatgatggaagacactaaaggaaaaaattaacgacaaagacagcaccaacagatgtcgttgttccagagctgatgaggggtatctcgaagcacacgaaactttttccttccttcattcacgcacactactctctaatgagcaacggtatacggccttccttccagttacttgaatttgaaataaaaaaaagtttgctgtcttgctatcaagtataaatagacctgcaattattaatcttttgtttcctcgtcattgttctcgttccctttcttccttgtttctttttctgcacaatatttcaagctataccaagcatacaatcaactatctcatatacacatatgttatatccagagaaattccaaggcattggtatctccaacgcaaaggattggaagcatcctaaacttgttagtttcgaccccaaacctttcggtgaccatgacgttgatgttgagattgaagcatgtggaatatgtgggagcgattttcatattgcagtaggcaattggggccctgttccggaaaatcaaattttgggtcacgaaattattggtagggtagtgaaggtgggttcaaaatgtcacacgggtgttaagattggtgatagggttggtgtaggtgcccaagcattggcttgtttcgaatgcgaaagatgcaaaagtgataacgaacaatactgtaccaacgatcatgttctaacaatgtggactccttacaaagatggatacatatctcaaggtggatttgcatcacatgttagattgcatgagcattttgcaattcaaattccggagaatatcccatcacctttggctgcaccattattgtgtgggggaataacagtgtttagtcctttattgagaaacggttgtggacctggtaagcgtgtggggattgttggcataggtggtattggtcacatggggatattactagctaaggccatgggagccgaagtttatgcgttcagtagaggacactccaagcgtgaagacagtatgaagttaggggcggaccattatattgccatgttggaggataaaggctggaccgaacaatattcaaatgctcttgatctgttagttgtgtgtagttcttctcttagtaaagttaattttgactcgattgtgaaaataatgaagattggcggctccattgtttccattgctgctccagaagttaacgagaagctggtactaaaaccactgggtctgatgggggtatctatctcatcttctgctatcggttcaagaaaagaaatagaacagctattaaagctagtcagcgagaaaaatgtgaagatttgggtagagaagctacccataagcgaggagggtgtatctcacgcatttacgagaatggaatccggagatgttaagtacaggtttacacttgtagactatgacaagaaattccataagtgagcggccgcataacaatactgacagtactaaataattgcctacttggcttcacatacgttgcatacgtcgatatagataataatgataatgacagcaggattatcgtaatacgtaatagttgaaaatctcaaaaatgtgtgggtcattacgtaaataatgataggaatgggattcttctatttttcctttttccattctagcagccgtcgggaaaacgtggcatcctctctttcgggctcaattggagtcacgctgccgtgagcatcctctctttccatatctaacaactgagcacgtaaccaatggaaaagcatgagcttagcgttgctccaaaaaagtattggatggttaataccatttgtctgttctcttctgactttgactcctcaaaaaaaaaaaatctacaatcaacagatcgcttcaattacgccctcacaaaaacttttttccttcttcttcgcccacgttaaattttatccctcatgttgtctaacggatttctgcacttgatttattataaaaagacaaagacataatacttctctatcaatttcagttattgttcttccttgcgttattcttctgttcttctttttcttttgtcatatataaccataaccaagtaatacatattcaaactcgagatgtccaaagctacttataaagaaagggctgcaacccatccatccccagtggcagctaaactgtttaacataatgcacgaaaaacaaactaacttatgcgcatcattagatgtaagaactactaaagagctactggagttggttgaggctttaggtccaaaaatttgtttgttgaagacacatgttgacatattaacagatttttctatggagggtaccgttaagcctctgaaagcgttaagcgcgaaatataactttcttttatttgaagaccgtaagtttgctgatattggaaatactgttaagttgcaatatagcgcaggagtttatagaattgccgaatgggctgacattacgaatgcccacggtgttgtaggtcctggcattgtgtctggattgaaacaagcggcagaggaagtgactaaggaaccaagaggtttactaatgctggcggaattatcttgcaaaggctctctagccaccggtgaatatacaaaaggtactgtggatattgcaaagtctgataaggacttcgtaatcggttttattgcacaaagagatatgggaggtcgtgagaattcaaaatgaagtgaagttcctatactttctagagaataggaacttctatagtgagtcgaataagggcgacacaaaatttattctaaatgcataataaatactgataacatcttatagtttgtattatattttgtattatcgttgacatgtataattttgatatcaaaaactgattttccctttattattttcgagatttattttcttaattctctttaacaaactagaaatattgtatatacaaaaaatcataaataatagatgaatagtttaattataggtgttcatcaatcgaaaaagcaacgtatcttatttaaagtgcgttgcttttttctcatttataaggttaaataattctcatatatcaagcaaagtgacaggcgcccttaaatattctgacaaatgctctttccctaaactccccccataaaaaaacccgccgaagcgggtttttacgttatttgcggattaacgattactcgttatcagaaccgcccagggggcccgagcttaagactggccgtcgttttacaacacagaaagagtttgtagaaacgcaaaaaggccatccgtcaggggccttctgcttagtttgatgcctggcagttccctactctcgccttccgcttcctcgctcactgactcgctgcgctcggtcgttcggctgcggcgagcggtatcagctcactcaaaggcggtaatacggttatccacagaatcaggggataacgcaggaaagaacatgtgagcaaaaggccagcaaaaggccaggaaccgtaaaaaggccgcgttgctggcgtttttccataggctccgcccccctgacgagcatcacaaaaatcgacgctcaagtcagaggtggcgaaacccgacaggactataaagataccaggcgtttccccctggaagctccctcgtgcgctctcctgttccgaccctgccgcttaccggatacctgtccgcctttctcccttcgggaagcgtggcgctttctcatagctcacgctgtaggtatctcagttcggtgtaggtcgttcgctccaagctgggctgtgtgcacgaaccccccgttcagcccgaccgctgcgccttatccggtaactatcgtcttgagtccaacccggtaagacacgacttatcgccactggcagcagccactggtaacaggattagcagagcgaggtatgtaggcggtgctacagagttcttgaagtggtgggctaactacggctacactagaagaacagtatttggtatctgcgctctgctgaagccagttaccttcggaaaaagagttggtagctcttgatccggcaaacaaaccaccgctggtagcggtggtttttttgtttgcaagcagcagattacgcgcagaaaaaaaggatctcaagaagatcctttgatcttttctacggggtctgacgctcagtggaacgacgcgcgcgtaactcacgttaagggattttggtcatgagcttgcgccgtcccgtcaagtcagcgtaatgctctgcttt

SEQ ID NO: 5 - DNA, 8667 bp, Artificial Sequence
  Plasmid pGV1812
tagaaaaactcatcgagcatcaaatgaaactgcaatttattcatatcaggattatcaataccatatttttgaaaaagccgtttctgtaatgaaggagaaaactcaccgaggcagttccataggatggcaagatcctggtatcggtctgcgattccgactcgtccaacatcaatacaacctattaatttcccctcgtcaaaaataaggttatcaagtgagaaatcaccatgagtgacgactgaatccggtgagaatggcaaaagtttatgcatttctttccagacttgttcaacaggccagccattacgctcgtcatcaaaatcactcgcatcaaccaaaccgttattcattcgtgattgcgcctgagcgaggcgaaatacgcgatcgctgttaaaaggacaattacaaacaggaatcgagtgcaaccggcgcaggaacactgccagcgcatcaacaatattttcacctgaatcaggatattcttctaatacctggaacgctgtttttccggggatcgcagtggtgagtaaccatgcatcatcaggagtacggataaaatgcttgatggtcggaagtggcataaattccgtcagccagtttagtctgaccatctcatctgtaacatcattggcaacgctacctttgccatgtttcagaaacaactctggcgcatcgggcttcccatacaagcgatagattgtcgcacctgattgcccgacattatcgcgagcccatttatacccatataaatcagcatccatgttggaatttaatcgcggcctcgacgtttcccgttgaatatggctcatattcttcctttttcaatattattgaagcatttatcagggttattgtctcatgagcggatacatatttgaatgtatttagaaaaataaacaaataggggtcagtgttacaaccaattaaccaattctgaacattatcgcgagcccatttatacctgaatatggctcataacaccccttgtttgcctggcggcagtagcgcggtggtcccacctgaccccatgccgaactcagaagtgaaacgccgtagcgccgatggtagtgtggggactccccatgcgagagtagggaactgccaggcatcaaataaaacgaaaggctcagtcgaaagactgggcctttcgcccgggctaattagggggtgtcgcccttattcgactctatagtgaagttcctattctctagaaagtataggaacttctgaagtggggctagccacgaaaaacaaactaacttatgcgcatcattagatgtaagaactactaaagagctactggagttggttgaggctttaggtccaaaaatttgtttgttgaagacacatgttgacatattaacagatttttctatggagggtaccgttaagcctctgaaagcgttaagcgcgaaatataactttcttttatttgaagaccgtaagtttgctgatattggaaatactgttaagttgcaatatagcgcaggagtttatagaattgccgaatgggctgacattacgaatgcccacggtgttgtaggtcctggcattgtgtctggattgaaacaagcggcagaggaagtgactaaggaaccaagaggtttactaatgctggcggaattatcttgcaaaggctctctagccaccggtgaatatacaaaaggtactgtggatattgcaaagtctgataaggacttcgtaatcggttttattgcacaaagagatatgggaggtcgtgacgagggctacgattggttaattatgacaccaggcgtaggattagatgacaaaggcgatgcgttaggccaacagtatcgtacagtcgatgatgtcgtaagtaccggttctgatatcattattgtcgggagaggtttatttgccaagggccgtgatgcgaaagtggagggggaaagatataggaaggcaggttgggaggcttacttgagaagatgtggtcagcagaattaagcggccgcataacaatactgacagtactaaataattgcctacttggcttcacatacgttgcatacgtcgatatagataataatgataatgacagcaggattatcgtaatacgtaatagttgaaaatctcaaaaatgtgtgggtcattacgtaaataatgataggaatgggattcttctatttttcctttttccattctagcagccgtcgggaaaacgtggcatcctctctttcgggctcaattggagtcacgctgccgtgagcatcctctctttccatatctaacaactgagcacgtaaccaatggaaaagcatgagcttagcgttgctccaaaaaagtattggatggttaataccatttgtctgttctcttctgactttgactcctcaaaaaaaaaaaatctacaatcaacagatcgcttcaattacgccctcacaaaaacttttttccttcttcttcgcccacgttaaattttatccctcatgttgtctaacggatttctgcacttgatttattataaaaagacaaagacataatacttctctatcaatttcagttattgttcttccttgcgttattcttctgttcttctttttcttttgtcatatataaccataaccaagtaatacatattcaaactcgagatggatacttaccgttacatcgggggtgatacgtacagatatataggtggtgggctcgagatggccaactattttaacacattaaatttgagacaacaattggctcaactgggtaagtgcagatttatgggaagggacgagtttgctgatggtgcttcttatctgcaaggaaagaaagtagtaattgttggctgcggtgctcagggtctaaaccaaggtttaaacatgagagattcaggtctggatatttcgtatgcattgaggaaagaggcaattgcagaaaagagggcctcctggcgtaaagcgacggaaaatgggttcaaagttggtacttacgaagaactgatccctcaggcagatttagtgattaacctaacaccagataagcaacactcagacgtagtaagaacagttcaaccgctgatgaaggatggggcagctttaggttactctcatggctttaatatcgttgaagtgggcgagcagatcagaaaagatataacagtcgtaatggttgcaccaaagtgcccaggtacggaagtcagagaggagtacaagaggggttttggtgtacctacattgatcgccgtacatcctgaaaatgaccccaaaggtgaaggtatggcaattgcgaaggcatgggcagccgcaaccggaggtcatagagcgggtgtgttagagagttctttcgtagctgaggtcaagagtgacttaatgggtgaacaaaccattctgtgcggaatgttgcaggcagggtctttactatgctttgataaattggtcgaagagggtacagatcctgcctatgctgaaaagttgatacaatttggttgggagacaatcaccgaggcacttaaacaaggtggcataacattgatgatggatagactttcaaatccggccaagctaagagcctacgccttatctgagcaactaaaagagatcatggcaccattattccaaaagcacatggacgatattatctccggtgagttttcctcaggaatgatggcagattgggcaaacgatgataaaaagttattgacgtggagagaagaaaccggcaagacggcattcgagacagccccacaatacgaaggtaaaattggtgaacaagaatactttgataagggagtattgatgatagctatggtgaaggcaggggtagaacttgcattcgaaactatggttgactccggtatcattgaagaatctgcatactatgagtctttgcatgaattgcctttgatagcaaatactattgcaagaaaaagactttacgagatgaatgttgtcatatcagacactgcagaatatggtaattacttatttagctacgcatgtgtcccgttgttaaagcccttcatggccgagttacaacctggtgatttggggaaggctattccggaaggagcggttgacaatggccaactgagagacgtaaatgaagctattcgttcacatgctatagaacaggtgggtaaaaagctgagaggatatatgaccgatatgaaaagaattgcagtggcaggatgaagatcttgtttaaagattacggatatttaacttacttagaataatgccatttttttgagttataataatcctacgttagtgtgagcgggatttaaactgtgaggaccttaatacattcagacacttctgcggtatcaccctacttattcccttcgagattatatctaggaacccatcaggttggtggaagattacccgttctaagacttttcagcttcctctattgatgttacacctggacaccccttttctggcatccagtttttaatcttcagtggcatgtgagattctccgaaattaattaaagcaatcacacaattctctcggataccacctcggttgaaactgacaggtggtttgttacgcatgctaatgcaaaggagcctatatacctttggctcggctgctgtaacagggaatataaagggcagcataatttaggagtttagtgaacttgcaacatttactattttcccttcttacgtaaatatttttctttttaattctaaatcaatctttttcaattttttgtttgtattcttttcttgcttaaatctataactacaaaaaacacatacataaactaaaagtcgacatgtacccatacgatgttccagattacgcaggtggtggtgtcgacatgcctaaatacagatcagctacgactacacacggtagaaatatggccggagccagggccctatggagagccaccggcatgacagatgcagattttggtaaacctataattgctgtagttaactcttttacacagtttgttccaggtcatgtacatctaagagacttgggcaaattggtggcagaacaaatcgaggctgctggtggtgttgcaaaagaatttaacactattgccgtagacgacggcattgcgatgggtcatggcggtatgctttattcgctaccctccagagaattaattgcagacagcgttgaatatatggtaaatgcccactgcgcagatgccatggtttgcatttccaattgtgacaaaatcacgccgggcatgttgatggcgtcattgagactaaatattcctgtgatcttcgttagcggaggtcccatggaagccgggaaaactaaactttccgatcagataatcaagttagacttggtcgatgccatgatccagggtgcggaccccaaagtaagcgactctcaatccgatcaagttgaaagatccgcatgtccaacttgcgggagttgctctgggatgttcacggcgaactctatgaattgcctaacagaggccctgggcctgtcacaacctggcaacggttcgcttttagcaactcatgctgatagaaagcaattatttctaaatgctggtaaaagaatcgttgaattaacaaaaagatattacgaacaaaacgatgaatctgcactgccaaggaacattgcttcaaaggccgctttcgaaaacgctatgacattggatattgcaatgggtggaagcacaaatactgtccttcatctactggcggctgctcaagaagcagaaattgatttcacaatgagcgatatcgacaagctatcacgtaaggtcccgcagctgtgtaaagtggcaccgtctactcaaaaataccacatggaagatgtccatcgtgctggaggcgttatcggaatcttgggggagttggacagggccggtctattaaacagagatgttaagaacgtgctaggtctaactttgcctcaaaccttagagcagtacgacgttatgttaactcaagatgacgcagtcaaaaacatgttcagagcggggccagctggaataaggactacccaagcgttctcgcaagattgcagatgggatactctggacgatgatagagctaacggttgcataagatcactagagcatgcttactcgaaagatggaggtttagctgttttatacggtaattttgccgaaaacggatgtatagtgaagaccgctggggttgatgattcaattctaaaattcactgggccagccaaggtatacgagtcacaagatgatgctgttgaagccatcttaggtgggaaagtggtggcaggggacgtggtggtaataagatatgaaggtccaaagggtggtccaggtatgcaagaaatgctgtaccctacttctttccttaaatctatgggtttaggcaaggcttgtgctcttataaccgatggtagattttctggaggtacatcaggcctttccataggacatgttagccccgaagctgcctcaggtggtagtattggcttaatcgaggatggtgacttaattgctattgacattcctaacaggggtattcaactacaggttagcgatgcagaattagccgctagaagagaggcacaagatgcgagaggcgataaagcatggacacctaagaacagggagagacaagtgagctttgccctgagagcttatgcctcgctggcgacgagcgcagacaaaggagccgtaagagataaatcaaaattgggtggttagggatccaatcgatccaaagaagagagttatcttgttcattggtgacggttctttgcaattgactgtccaagaaatctccaccatgatcagatggggtttgaagccatacttgttcgtcttgaacaacgatggttacaccattgaaagattgattcacggtgaaaccgctcaatacaactgtatccaatcttggaagcacttggacctattgccaaccttcggtgccaaggactacgaagccgtcagagtcgccaccactggtgaatggaacaagttgaccactgacaagaagttccaagaaaactctaagatcagattgatcgaagtcatgttgccagtcatggatgctccatccaacttggtcaagcaagctcaattgactgcttccatcaacgccaagcaagaatagagagggagaggataaagagataaattacgattttggattttaatgattttataaacaacaacaaccaaccagccttttactttatttggcatatacacaagcttaaaatgaagtgaagttcctatactttctagagaataggaacttctatagtgagtcgaataagggcgacacaaaatttattctaaatgcataataaatactgataacatcttatagtttgtattatattttgtattatcgttgacatgtataattttgatatcaaaaactgattttccctttattattttcgagatttattttcttaattctctttaacaaactagaaatattgtatatacaaaaaatcataaataatagatgaatagtttaattataggtgttcatcaatcgaaaaagcaacgtatcttatttaaagtgcgttgcttttttctcatttataaggttaaataattctcatatatcaagcaaagtgacaggcgcccttaaatattctgacaaatgctctttccctaaactccccccataaaaaaacccgccgaagcgggtttttacgttatttgcggattaacgattactcgttatcagaaccgcccagggggcccgagcttaagactggccgtcgttttacaacacagaaagagtttgtagaaacgcaaaaaggccatccgtcaggggccttctgcttagtttgatgcctggcagttccctactctcgccttccgcttcctcgctcactgactcgctgcgctcggtcgttcggctgcggcgagcggtatcagctcactcaaaggcggtaatacggttatccacagaatcaggggataacgcaggaaagaacatgtgagcaaaaggccagcaaaaggccaggaaccgtaaaaaggccgcgttgctggcgtttttccataggctccgcccccctgacgagcatcacaaaaatcgacgctcaagtcagaggtggcgaaacccgacaggactataaagataccaggcgtttccccctggaagctccctcgtgcgctctcctgttccgaccctgccgcttaccggatacctgtccgcctttctcccttcgggaagcgtggcgctttctcatagctcacgctgtaggtatctcagttcggtgtaggtcgttcgctccaagctgggctgtgtgcacgaaccccccgttcagcccgaccgctgcgccttatccggtaactatcgtcttgagtccaacccggtaagacacgacttatcgccactggcagcagccactggtaacaggattagcagagcgaggtatgtaggcggtgctacagagttcttgaagtggtgggctaactacggctacactagaagaacagtatttggtatctgcgctctgctgaagccagttaccttcggaaaaagagttggtagctcttgatccggcaaacaaaccaccgctggtagcggtggtttttttgtttgcaagcagcagattacgcgcagaaaaaaaggatctcaagaagatcctttgatcttttctacggggtctgacgctcagtggaacgacgcgcgcgtaactcacgttaagggattttggtcatgagcttgcgccgtcccgtcaagtcagcgtaatgctctgcttt

SEQ ID NO: 6 - DNA, 8434 bp, Artificial Sequence
  Plasmid pGV1817
tagaaaaactcatcgagcatcaaatgaaactgcaatttattcatatcaggattatcaataccatatttttgaaaaagccgtttctgtaatgaaggagaaaactcaccgaggcagttccataggatggcaagatcctggtatcggtctgcgattccgactcgtccaacatcaatacaacctattaatttcccctcgtcaaaaataaggttatcaagtgagaaatcaccatgagtgacgactgaatccggtgagaatggcaaaagtttatgcatttctttccagacttgttcaacaggccagccattacgctcgtcatcaaaatcactcgcatcaaccaaaccgttattcattcgtgattgcgcctgagcgaggcgaaatacgcgatcgctgttaaaaggacaattacaaacaggaatcgagtgcaaccggcgcaggaacactgccagcgcatcaacaatattttcacctgaatcaggatattcttctaatacctggaacgctgtttttccggggatcgcagtggtgagtaaccatgcatcatcaggagtacggataaaatgcttgatggtcggaagtggcataaattccgtcagccagtttagtctgaccatctcatctgtaacatcattggcaacgctacctttgccatgtttcagaaacaactctggcgcatcgggcttcccatacaagcgatagattgtcgcacctgattgcccgacattatcgcgagcccatttatacccatataaatcagcatccatgttggaatttaatcgcggcctcgacgtttcccgttgaatatggctcatattcttcctttttcaatattattgaagcatttatcagggttattgtctcatgagcggatacatatttgaatgtatttagaaaaataaacaaataggggtcagtgttacaaccaattaaccaattctgaacattatcgcgagcccatttatacctgaatatggctcataacaccccttgtttgcctggcggcagtagcgcggtggtcccacctgaccccatgccgaactcagaagtgaaacgccgtagcgccgatggtagtgtggggactccccatgcgagagtagggaactgccaggcatcaaataaaacgaaaggctcagtcgaaagactgggcctttcgcccgggctaattagggggtgtcgcccttattcgactctatagtgaagttcctattctctagaaagtataggaacttctgaagtggggctagccacgaaaaacaaactaacttatgcgcatcattagatgtaagaactactaaagagctactggagttggttgaggctttaggtccaaaaatttgtttgttgaagacacatgttgacatattaacagatttttctatggagggtaccgttaagcctctgaaagcgttaagcgcgaaatataactttcttttatttgaagaccgtaagtttgctgatattggaaatactgttaagttgcaatatagcgcaggagtttatagaattgccgaatgggctgacattacgaatgcccacggtgttgtaggtcctggcattgtgtctggattgaaacaagcggcagaggaagtgactaaggaaccaagaggtttactaatgctggcggaattatcttgcaaaggctctctagccaccggtgaatatacaaaaggtactgtggatattgcaaagtctgataaggacttcgtaatcggttttattgcacaaagagatatgggaggtcgtgacgagggctacgattggttaattatgacaccaggcgtaggattagatgacaaaggcgatgcgttaggccaacagtatcgtacagtcgatgatgtcgtaagtaccggttctgatatcattattgtcgggagaggtttatttgccaagggccgtgatgcgaaagtggagggggaaagatataggaaggcaggttgggaggcttacttgagaagatgtggtcagcagaattaagcggccgcataacaatactgacagtactaaataattgcctacttggcttcacatacgttgcatacgtcgatatagataataatgataatgacagcaggattatcgtaatacgtaatagttgaaaatctcaaaaatgtgtgggtcattacgtaaataatgataggaatgggattcttctatttttcctttttccattctagcagccgtcgggaaaacgtggcatcctctctttcgggctcaattggagtcacgctgccgtgagcatcctctctttccatatctaacaactgagcacgtaaccaatggaaaagcatgagcttagcgttgctccaaaaaagtattggatggttaataccatttgtctgttctcttctgactttgactcctcaaaaaaaaaaaatctacaatcaacagatcgcttcaattacgccctcacaaaaacttttttccttcttcttcgcccacgttaaattttatccctcatgttgtctaacggatttctgcacttgatttattataaaaagacaaagacataatacttctctatcaatttcagttattgttcttccttgcgttattcttctgttcttctttttcttttgtcatatataaccataaccaagtaatacatattcaaactcgagatgttgagaactcaagccgccagattgatctgcaactcccgtgtcatcactgctaagagaacctttgctttggccacccgtgctgctgcttacagcagaccagctgcccgtttcgttaagccaatgatcactacccgtggtttgaagcaaatcaacttcggtggtactgttgaaaccgtctacgaaagagctgactggccaagagaaaagttgttggactacttcaagaacgacacttttgctttgatcggttacggttcccaaggttacggtcaaggtttgaacttgagagacaacggtttgaacgttatcattggtgtccgtaaagatggtgcttcttggaaggctgccatcgaagacggttgggttccaggcaagaacttgttcactgttgaagatgctatcaagagaggtagttacgttatgaacttgttgtccgatgccgctcaatcagaaacctggcctgctatcaagccattgttgaccaagggtaagactttgtacttctcccacggtttctccccagtcttcaaggacttgactcacgttgaaccaccaaaggacttagatgttatcttggttgctccaaagggttccggtagaactgtcagatctttgttcaaggaaggtcgtggtattaactcttcttacgccgtctggaacgatgtcaccggtaaggctcacgaaaaggcccaagctttggccgttgccattggttccggttacgtttaccaaaccactttcgaaagagaagtcaactctgacttgtacggtgaaagaggttgtttaatgggtggtatccacggtatgttcttggctcaatacgacgtcttgagagaaaacggtcactccccatctgaagctttcaacgaaaccgtcgaagaagctacccaatctctatacccattgatcggtaagtacggtatggattacatgtacgatgcttgttccaccaccgccagaagaggtgctttggactggtacccaatcttcaagaatgctttgaagcctgttttccaagacttgtacgaatctaccaagaacggtaccgaaaccaagagatctttggaattcaactctcaacctgactacagagaaaagctagaaaaggaattagacaccatcagaaacatggaaatctggaaggttggtaaggaagtcagaaagttgagaccagaaaaccaataacctaggatcttgtttaaagattacggatatttaacttacttagaataatgccatttttttgagttataataatcctacgttagtgtgagcgggatttaaactgtgaggaccttaatacattcagacacttctgcggtatcaccctacttattcccttcgagattatatctaggaacccatcaggttggtggaagattacccgttctaagacttttcagcttcctctattgatgttacacctggacaccccttttctggcatccagtttttaatcttcagtggcatgtgagattctccgaaattaattaaagcaatcacacaattctctcggataccacctcggttgaaactgacaggtggtttgttacgcatgctaatgcaaaggagcctatatacctttggctcggctgctgtaacagggaatataaagggcagcataatttaggagtttagtgaacttgcaacatttactattttcccttcttacgtaaatatttttctttttaattctaaatcaatctttttcaattttttgtttgtattcttttcttgcttaaatctataactacaaaaaacacatacataaactaaaagtcgacatgggcttgttaacgaaagttgctacatctagacaattctctacaacgagatgcgttgcaaagaagctcaacaagtactcgtatatcatcactgaacctaagggccaaggtgcgtcccaggccatgctttatgccaccggtttcaagaaggaagatttcaagaagcctcaagtcggggttggttcctgttggtggtccggtaacccatgtaacatgcatctattggacttgaataacagatgttctcaatccattgaaaaagcgggtttgaaagctatgcagttcaacaccatcggtgtttcagacggtatctctatgggtactaaaggtatgagatactcgttacaaagtagagaaatcattgcagactcctttgaaaccatcatgatggcacaacactacgatgctaacatcgccatcccatcatgtgacaaaaacatgcccggtgtcatgatggccatgggtagacataacagaccttccatcatggtatatggtggtactatcttgcccggtcatccaacatgtggttcttcgaagatctctaaaaacatcgatatcgtctctgcgttccaatcctacggtgaatatatttccaagcaattcactgaagaagaaagagaagatgttgtggaacatgcatgcccaggtcctggttcttgtggtggtatgtatactgccaacacaatggcttctgccgctgaagtgctaggtttgaccattccaaactcctcttccttcccagccgtttccaaggagaagttagctgagtgtgacaacattggtgaatacatcaagaagacaatggaattgggtattttacctcgtgatatcctcacaaaagaggcttttgaaaacgccattacttatgtcgttgcaaccggtgggtccactaatgctgttttgcatttggtggctgttgctcactctgcgggtgtcaagttgtcaccagatgatttccaaagaatcagtgatactacaccattgatcggtgacttcaaaccttctggtaaatacgtcatggccgatttgattaacgttggtggtacccaatctgtgattaagtatctatatgaaaacaacatgttgcacggtaacacaatgactgttaccggtgacactttggcagaacgtgcaaagaaagcaccaagcctacctgaaggacaagagattattaagccactctcccacccaatcaaggccaacggtcacttgcaaattctgtacggttcattggcaccaggtggagctgtgggtaaaattaccggtaaggaaggtacttacttcaagggtagagcacgtgtgttcgaagaggaaggtgcctttattgaagccttggaaagaggtgaaatcaagaagggtgaaaaaaccgttgttgttatcagatatgaaggtccaagaggtgcaccaggtatgcctgaaatgctaaagccttcctctgctctgatgggttacggtttgggtaaagatgttgcattgttgactgatggtagattctctggtggttctcacgggttcttaatcggccacattgttcccgaagccgctgaaggtggtcctatcgggttggtcagagacggcgatgagattatcattgatgctgataataacaagattgacctattagtctctgataaggaaatggctcaacgtaaacaaagttgggttgcacctccacctcgttacacaagaggtactctatccaagtatgctaagttggtttccaacgcttccaacggttgtgttttagatgcttgaggatccgcgatttaatctctaattattagttaaagttttataagcatttttatgtaacgaaaaataaattggttcatattattactgcactgtcacttaccatggaaagaccagacaagaagttgccgacagtctgttgaattggcctggttaggcttaagtctgggtccgcttctttacaaatttggagaatttctcttaaacgatatgtatattcttttcgttggaaaagatgtcttccaaaaaaaaaaccgatgaattagtggaaccaaggaaaaaaaaagaggtatccttgattaaggaacactgtttaaacagtgtggtttccaaaaccctgaaactgcattagtgtaatagaagactagacacctcgatacaaataatggttactcaattcaaaactgccagcgaattcgactctgcaattgctcaagacaagctagttgtcgtagatttctacgccacttggtgcggtccatgtaaaatgattgctccaatgattgaaaaattctctgaacaatacccacaagctgatttctataaattggatgtcgatgaattgggtgatgttgcacaaaagaatgaagtttccgctatgccaactttgcttctattcaagaacggtaaggaagttgcaaaggttgttggtgccaacccagcggctattaagcaagccattgctgctaatgcttaaactcacccaatgaccgatatattgtgtttctatactgtgtttgttatatatagtttacctttaagcttaaaatgaagtgaagttcctatactttctagagaataggaacttctatagtgagtcgaataagggcgacacaaaatttattctaaatgcataataaatactgataacatcttatagtttgtattatattttgtattatcgttgacatgtataattttgatatcaaaaactgattttccctttattattttcgagatttattttcttaattctctttaacaaactagaaatattgtatatacaaaaaatcataaataatagatgaatagtttaattataggtgttcatcaatcgaaaaagcaacgtatcttatttaaagtgcgttgcttttttctcatttataaggttaaataattctcatatatcaagcaaagtgacaggcgcccttaaatattctgacaaatgctctttccctaaactccccccataaaaaaacccgccgaagcgggtttttacgttatttgcggattaacgattactcgttatcagaaccgcccagggggcccgagcttaagactggccgtcgttttacaacacagaaagagtttgtagaaacgcaaaaaggccatccgtcaggggccttctgcttagtttgatgcctggcagttccctactctcgccttccgcttcctcgctcactgactcgctgcgctcggtcgttcggctgcggcgagcggtatcagctcactcaaaggcggtaatacggttatccacagaatcaggggataacgcaggaaagaacatgtgagcaaaaggccagcaaaaggccaggaaccgtaaaaaggccgcgttgctggcgtttttccataggctccgcccccctgacgagcatcacaaaaatcgacgctcaagtcagaggtggcgaaacccgacaggactataaagataccaggcgtttccccctggaagctccctcgtgcgctctcctgttccgaccctgccgcttaccggatacctgtccgcctttctcccttcgggaagcgtggcgctttctcatagctcacgctgtaggtatctcagttcggtgtaggtcgttcgctccaagctgggctgtgtgcacgaaccccccgttcagcccgaccgctgcgccttatccggtaactatcgtcttgagtccaacccggtaagacacgacttatcgccactggcagcagccactggtaacaggattagcagagcgaggtatgtaggcggtgctacagagttcttgaagtggtgggctaactacggctacactagaagaacagtatttggtatctgcgctctgctgaagccagttaccttcggaaaaagagttggtagctcttgatccggcaaacaaaccaccgctggtagcggtggtttttttgtttgcaagcagcagattacgcgcagaaaaaaaggatctcaagaagatcctttgatcttttctacggggtctgacgctcagtggaacgacgcgcgcgtaactcacgttaagggattttggtcatgagcttgcgccgtcccgtcaagtcagcgtaatgctctgcttt

SEQ ID NO: 7 - DNA, 8185 bp, Artificial Sequence
  Plasmid pGV1832
tagaaaaactcatcgagcatcaaatgaaactgcaatttattcatatcaggattatcaataccatatttttgaaaaagccgtttctgtaatgaaggagaaaactcaccgaggcagttccataggatggcaagatcctggtatcggtctgcgattccgactcgtccaacatcaatacaacctattaatttcccctcgtcaaaaataaggttatcaagtgagaaatcaccatgagtgacgactgaatccggtgagaatggcaaaagtttatgcatttctttccagacttgttcaacaggccagccattacgctcgtcatcaaaatcactcgcatcaaccaaaccgttattcattcgtgattgcgcctgagcgaggcgaaatacgcgatcgctgttaaaaggacaattacaaacaggaatcgagtgcaaccggcgcaggaacactgccagcgcatcaacaatattttcacctgaatcaggatattcttctaatacctggaacgctgtttttccggggatcgcagtggtgagtaaccatgcatcatcaggagtacggataaaatgcttgatggtcggaagtggcataaattccgtcagccagtttagtctgaccatctcatctgtaacatcattggcaacgctacctttgccatgtttcagaaacaactctggcgcatcgggcttcccatacaagcgatagattgtcgcacctgattgcccgacattatcgcgagcccatttatacccatataaatcagcatccatgttggaatttaatcgcggcctcgacgtttcccgttgaatatggctcatattcttcctttttcaatattattgaagcatttatcagggttattgtctcatgagcggatacatatttgaatgtatttagaaaaataaacaaataggggtcagtgttacaaccaattaaccaattctgaacattatcgcgagcccatttatacctgaatatggctcataacaccccttgtttgcctggcggcagtagcgcggtggtcccacctgaccccatgccgaactcagaagtgaaacgccgtagcgccgatggtagtgtggggactccccatgcgagagtagggaactgccaggcatcaaataaaacgaaaggctcagtcgaaagactgggcctttcgcccgggctaattagggggtgtcgcccttattcgactctatagtgaagttcctattctctagaaagtataggaacttctgaagtggggctagccacgaaaaacaaactaacttatgcgcatcattagatgtaagaactactaaagagctactggagttggttgaggctttaggtccaaaaatttgtttgttgaagacacatgttgacatattaacagatttttctatggagggtaccgttaagcctctgaaagcgttaagcgcgaaatataactttcttttatttgaagaccgtaagtttgctgatattggaaatactgttaagttgcaatatagcgcaggagtttatagaattgccgaatgggctgacattacgaatgcccacggtgttgtaggtcctggcattgtgtctggattgaaacaagcggcagaggaagtgactaaggaaccaagaggtttactaatgctggcggaattatcttgcaaaggctctctagccaccggtgaatatacaaaaggtactgtggatattgcaaagtctgataaggacttcgtaatcggttttattgcacaaagagatatgggaggtcgtgacgagggctacgattggttaattatgacaccaggcgtaggattagatgacaaaggcgatgcgttaggccaacagtatcgtacagtcgatgatgtcgtaagtaccggttctgatatcattattgtcgggagaggtttatttgccaagggccgtgatgcgaaagtggagggggaaagatataggaaggcaggttgggaggcttacttgagaagatgtggtcagcagaattaagcggccgcataacaatactgacagtactaaataattgcctacttggcttcacatacgttgcatacgtcgatatagataataatgataatgacagcaggattatcgtaatacgtaatagttgaaaatctcaaaaatgtgtgggtcattacgtaaataatgataggaatgggattcttctatttttcctttttccattctagcagccgtcgggaaaacgtggcatcctctctttcgggctcaattggagtcacgctgccgtgagcatcctctctttccatatctaacaactgagcacgtaaccaatggaaaagcatgagcttagcgttgctccaaaaaagtattggatggttaataccatttgtctgttctcttctgactttgactcctcaaaaaaaaaaaatctacaatcaacagatcgcttcaattacgccctcacaaaaacttttttccttcttcttcgcccacgttaaattttatccctcatgttgtctaacggatttctgcacttgatttattataaaaagacaaagacataatacttctctatcaatttcagttattgttcttccttgcgttattcttctgttcttctttttcttttgtcatatataaccataaccaagtaatacatattcaaactcgagatgttgagaactcaagccgccagattgatctgcaactcccgtgtcatcactgctaagagaacctttgctttggccacccgtgctgctgcttacagcagaccagctgcccgtttcgttaagccaatgatcactacccgtggtttgaagcaaatcaacttcggtggtactgttgaaaccgtctacgaaagagctgactggccaagagaaaagttgttggactacttcaagaacgacacttttgctttgatcggttacggttcccaaggttacggtcaaggtttgaacttgagagacaacggtttgaacgttatcattggtgtccgtaaagatggtgcttcttggaaggctgccatcgaagacggttgggttccaggcaagaacttgttcactgttgaagatgctatcaagagaggtagttacgttatgaacttgttgtccgatgccgctcaatcagaaacctggcctgctatcaagccattgttgaccaagggtaagactttgtacttctcccacggtttctccccagtcttcaaggacttgactcacgttgaaccaccaaaggacttagatgttatcttggttgctccaaagggttccggtagaactgtcagatctttgttcaaggaaggtcgtggtattaactcttcttacgccgtctggaacgatgtcaccggtaaggctcacgaaaaggcccaagctttggccgttgccattggttccggttacgtttaccaaaccactttcgaaagagaagtcaactctgacttgtacggtgaaagaggttgtttaatgggtggtatccacggtatgttcttggctcaatacgacgtcttgagagaaaacggtcactccccatctgaagctttcaacgaaaccgtcgaagaagctacccaatctctatacccattgatcggtaagtacggtatggattacatgtacgatgcttgttccaccaccgccagaagaggtgctttggactggtacccaatcttcaagaatgctttgaagcctgttttccaagacttgtacgaatctaccaagaacggtaccgaaaccaagagatctttggaattcaactctcaacctgactacagagaaaagctagaaaaggaattagacaccatcagaaacatggaaatctggaaggttggtaaggaagtcagaaagttgagaccagaaaaccaataacctaggatcttgtttaaagattacggatatttaacttacttagaataatgccatttttttgagttataataatcctacgttagtgtgagcgggatttaaactgtgaggaccttaatacattcagacacttctgcggtatcaccctacttattcccttcgagattatatctaggaacccatcaggttggtggaagattacccgttctaagacttttcagcttcctctattgatgttacacctggacaccccttttctggcatccagtttttaatcttcagtggcatgtgagattctccgaaattaattaaagcaatcacacaattctctcggataccacctcggttgaaactgacaggtggtttgttacgcatgctaatgcaaaggagcctatatacctttggctcggctgctgtaacagggaatataaagggcagcataatttaggagtttagtgaacttgcaacatttactattttcccttcttacgtaaatatttttctttttaattctaaatcaatctttttcaattttttgtttgtattcttttcttgcttaaatctataactacaaaaaacacatacataaactaaaagtcgacatgggcttgttaacgaaagttgctacatctagacaattctctacaacgagatgcgttgcaaagaagctcaacaagtactcgtatatcatcactgaacctaagggccaaggtgcgtcccaggccatgctttatgccaccggtttcaagaaggaagatttcaagaagcctcaagtcggggttggttcctgttggtggtccggtaacccatgtaacatgcatctattggacttgaataacagatgttctcaatccattgaaaaagcgggtttgaaagctatgcagttcaacaccatcggtgtttcagacggtatctctatgggtactaaaggtatgagatactcgttacaaagtagagaaatcattgcagactcctttgaaaccatcatgatggcacaacactacgatgctaacatcgccatcccatcatgtgacaaaaacatgcccggtgtcatgatggccatgggtagacataacagaccttccatcatggtatatggtggtactatcttgcccggtcatccaacatgtggttcttcgaagatctctaaaaacatcgatatcgtctctgcgttccaatcctacggtgaatatatttccaagcaattcactgaagaagaaagagaagatgttgtggaacatgcatgcccaggtcctggttcttgtggtggtatgtatactgccaacacaatggcttctgccgctgaagtgctaggtttgaccattccaaactcctcttccttcccagccgtttccaaggagaagttagctgagtgtgacaacattggtgaatacatcaagaagacaatggaattgggtattttacctcgtgatatcctcacaaaagaggcttttgaaaacgccattacttatgtcgttgcaaccggtgggtccactaatgctgttttgcatttggtggctgttgctcactctgcgggtgtcaagttgtcaccagatgatttccaaagaatcagtgatactacaccattgatcggtgacttcaaaccttctggtaaatacgtcatggccgatttgattaacgttggtggtacccaatctgtgattaagtatctatatgaaaacaacatgttgcacggtaacacaatgactgttaccggtgacactttggcagaacgtgcaaagaaagcaccaagcctacctgaaggacaagagattattaagccactctcccacccaatcaaggccaacggtcacttgcaaattctgtacggttcattggcaccaggtggagctgtgggtaaaattaccggtaaggaaggtacttacttcaagggtagagcacgtgtgttcgaagaggaaggtgcctttattgaagccttggaaagaggtgaaatcaagaagggtgaaaaaaccgttgttgttatcagatatgaaggtccaagaggtgcaccaggtatgcctgaaatgctaaagccttcctctgctctgatgggttacggtttgggtaaagatgttgcattgttgactgatggtagattctctggtggttctcacgggttcttaatcggccacattgttcccgaagccgctgaaggtggtcctatcgggttggtcagagacggcgatgagattatcattgatgctgataataacaagattgacctattagtctctgataaggaaatggctcaacgtaaacaaagttgggttgcacctccacctcgttacacaagaggtactctatccaagtatgctaagttggtttccaacgcttccaacggttgtgttttagatgcttgaggatccaatcgatccaaagaagagagttatcttgttcattggtgacggttctttgcaattgactgtccaagaaatctccaccatgatcagatggggtttgaagccatacttgttcgtcttgaacaacgatggttacaccattgaaagattgattcacggtgaaaccgctcaatacaactgtatccaatcttggaagcacttggacctattgccaaccttcggtgccaaggactacgaagccgtcagagtcgccaccactggtgaatggaacaagttgaccactgacaagaagttccaagaaaactctaagatcagattgatcgaagtcatgttgccagtcatggatgctccatccaacttggtcaagcaagctcaattgactgcttccatcaacgccaagcaagaatagagagggagaggataaagagataaattacgattttggattttaatgattttataaacaacaacaaccaaccagccttttactttatttggcatatacacaagcttaaaatgaagtgaagttcctatactttctagagaataggaacttctatagtgagtcgaataagggcgacacaaaatttattctaaatgcataataaatactgataacatcttatagtttgtattatattttgtattatcgttgacatgtataattttgatatcaaaaactgattttccctttattattttcgagatttattttcttaattctctttaacaaactagaaatattgtatatacaaaaaatcataaataatagatgaatagtttaattataggtgttcatcaatcgaaaaagcaacgtatcttatttaaagtgcgttgcttttttctcatttataaggttaaataattctcatatatcaagcaaagtgacaggcgcccttaaatattctgacaaatgctctttccctaaactccccccataaaaaaacccgccgaagcgggtttttacgttatttgcggattaacgattactcgttatcagaaccgcccagggggcccgagcttaagactggccgtcgttttacaacacagaaagagtttgtagaaacgcaaaaaggccatccgtcaggggccttctgcttagtttgatgcctggcagttccctactctcgccttccgcttcctcgctcactgactcgctgcgctcggtcgttcggctgcggcgagcggtatcagctcactcaaaggcggtaatacggttatccacagaatcaggggataacgcaggaaagaacatgtgagcaaaaggccagcaaaaggccaggaaccgtaaaaaggccgcgttgctggcgtttttccataggctccgcccccctgacgagcatcacaaaaatcgacgctcaagtcagaggtggcgaaacccgacaggactataaagataccaggcgtttccccctggaagctccctcgtgcgctctcctgttccgaccctgccgcttaccggatacctgtccgcctttctcccttcgggaagcgtggcgctttctcatagctcacgctgtaggtatctcagttcggtgtaggtcgttcgctccaagctgggctgtgtgcacgaaccccccgttcagcccgaccgctgcgccttatccggtaactatcgtcttgagtccaacccggtaagacacgacttatcgccactggcagcagccactggtaacaggattagcagagcgaggtatgtaggcggtgctacagagttcttgaagtggtgggctaactacggctacactagaagaacagtatttggtatctgcgctctgctgaagccagttaccttcggaaaaagagttggtagctcttgatccggcaaacaaaccaccgctggtagcggtggtttttttgtttgcaagcagcagattacgcgcagaaaaaaaggatctcaagaagatcctttgatcttttctacggggtctgacgctcagtggaacgacgcgcgcgtaactcacgttaagggattttggtcatgagcttgcgccgtcccgtcaagtcagcgtaatgctctgcttt

SEQ ID NO: 8 - DNA, 10844 bp, Artificial Sequence
  Plasmid pGV1834
tagaaaaactcatcgagcatcaaatgaaactgcaatttattcatatcaggattatcaataccatatttttgaaaaagccgtttctgtaatgaaggagaaaactcaccgaggcagttccataggatggcaagatcctggtatcggtctgcgattccgactcgtccaacatcaatacaacctattaatttcccctcgtcaaaaataaggttatcaagtgagaaatcaccatgagtgacgactgaatccggtgagaatggcaaaagtttatgcatttctttccagacttgttcaacaggccagccattacgctcgtcatcaaaatcactcgcatcaaccaaaccgttattcattcgtgattgcgcctgagcgaggcgaaatacgcgatcgctgttaaaaggacaattacaaacaggaatcgagtgcaaccggcgcaggaacactgccagcgcatcaacaatattttcacctgaatcaggatattcttctaatacctggaacgctgtttttccggggatcgcagtggtgagtaaccatgcatcatcaggagtacggataaaatgcttgatggtcggaagtggcataaattccgtcagccagtttagtctgaccatctcatctgtaacatcattggcaacgctacctttgccatgtttcagaaacaactctggcgcatcgggcttcccatacaagcgatagattgtcgcacctgattgcccgacattatcgcgagcccatttatacccatataaatcagcatccatgttggaatttaatcgcggcctcgacgtttcccgttgaatatggctcatattcttcctttttcaatattattgaagcatttatcagggttattgtctcatgagcggatacatatttgaatgtatttagaaaaataaacaaataggggtcagtgttacaaccaattaaccaattctgaacattatcgcgagcccatttatacctgaatatggctcataacaccccttgtttgcctggcggcagtagcgcggtggtcccacctgaccccatgccgaactcagaagtgaaacgccgtagcgccgatggtagtgtggggactccccatgcgagagtagggaactgccaggcatcaaataaaacgaaaggctcagtcgaaagactgggcctttcgcccgggctaattagggggtgtcgcccttattcgactctatagtgaagttcctattctctagaaagtataggaacttctgaagtggggagatctcaccagtaaaacatacgcatacacatacacacatagagcaagcaagcaggctagcaaccaggaaaggctgccagtgactgctactgggtgtctaagaaccgtagggcggattattgttgcggtggttggttgcgggtggttatgcgatggtacggtgcagaatcgtacggtgttggttatggaattagtatgggtatgtgatatgtggtaatatgtgatattgggttattgtgatttggaatactgaatatcgaatatgggatatggaatatggccatggcatggtatggtatgggatgggagtattctattttattttattttattctggttcctgcgtttagggtagggtaggaagaaggtgagtgcttttgtatataagtggagtgtctggatcagttttgtggattgtgaatgttagtttcccctttaatgtatatttgtattatttgcttttgagtactcaataaccaagcacaactactagttttaaaggatccatcctcttaaacagtacaaatcgcaaagaaaagctccacacccaaaccaaataattgcagtcgagatgctttcactacgtcaatctataagatttttcaagccagccacaagaactttgtgtagctctagatatctgcttatgttgactaaagctacaaaagagcagaaatcattggtgaaaaataggggtgcagaacttgttgtggactgtttggtagaacagggcgtaacacatgtttttggtatcccaggtgcaaaaatcgacgccgtgtttgatgcattacaagacaagggtccagaaattattgttgctagacatgagcaaaatgccgcatttatggcgcaagctgtaggtaggcttacaggtaaacctggtgttgtcctagttacgtctggcccaggagcctccaatttagcaactggtctattgacagctaatactgagggagatcctgtagttgcgttagccggtaatgtaattagagctgataggcttaagagaactcaccagtctctagacaacgctgctttattccaaccgatcaccaagtactcagtagaggtacaagacgtaaagaatatacctgaagctgtgacaaacgcatttcgtatagcttctgctggtcaggctggtgccgcgtttgtttcttttcctcaagacgttgtcaatgaagtgaccaatactaaaaacgttagagcggttgcagcccctaaactaggtccagccgcagacgacgcaattagcgctgcaattgctaaaattcagacggcgaaactaccagtagtccttgtcggtatgaagggcggaagaccagaagcaataaaagctgttcgtaagttattgaagaaagtccaattacctttcgttgagacttaccaagcagcaggtactttatctagagatttagaggatcagtattttggaaggataggtctatttagaaaccaaccaggagatttactattagaacaagctgatgttgtacttactatcggttatgatcctatagagtatgacccaaagttttggaacataaatggggatagaacaattatacatctagacgagataatcgccgacatcgatcacgcttatcaaccagatttagaactaatcggagatatcccgtcaacaatcaatcatattgaacatgatgctgtaaaggttgagttcgctgaacgtgagcagaaaatcttatctgatctaaagcaatatatgcatgagggtgaacaagttccagcagactggaaatctgaccgtgcacatcctttggaaatcgttaaggaactaagaaatgcggtcgatgatcatgtgactgttacatgtgatatcggttcacatgcaatttggatgtcacgttattttaggagctacgaaccattaactttaatgatatctaacgggatgcaaactctgggggttgcacttccttgggctattggcgctagtttagttaagcccggtgagaaggtggtatcggtatcaggtgatggtggctttctgttttcggctatggaattagaaactgcagtccgtttaaaagctcccattgtgcatattgtctggaatgattctacttacgacatggttgcttttcaacagttgaagaaatacaatagaacttcggctgtagactttggtaacatcgatattgtgaaatatgctgagtcttttggcgcaacaggcctgagggtggaaagtccagatcagttagctgatgtgttgagacaagggatgaatgccgagggaccggtaatcatagatgtgccagttgactactcagacaatattaatttggcttctgataaacttcctaaagagtttggcgagctaatgaagaccaaagccttataaggatccataaaaaacacgctttttcagttcgagtttatcattatcaatactgccatttcaaagaatacgtaaataattaatagtagtgattttcctaactttatttagtcaaaaaattagccttttaattctgctgtaacccgtacatgcccaaaatagggggcgggttacacagaatatataacatcgtaggtgtctgggtgaacagtttattcctggcatccactaaatataatggagcccgctttttaagctggcatccagaaaaaaaaagaatcccagcaccaaaatattgttttcttcaccaaccatcagttcataggtccattctcttagcgcaactacagagaacaggggcacaaacaggcaaaaaacgggcacaacctcaatggagtgatgcaacctgcctggagtaaatgatgacacaaggcaattgacccacgcatgtatctatctcattttcttacaccttctattaccttctgctctctctgatttggaaaaagctgaaaaaaaaggttgaaaccagttccctgaaattattcccctacttgactaataagtatataaagacggtaggtattgattgtaattctgtaaatctatttcttaaacttcttaaattctacttttatagttagtcttttttttagttttaaaacaccaagaacttagtttcgaataaacacacataaacaaacaaaaagcttatgtatactgttggagattatttgttagatagattgcatgaactaggcattgaagaaattttcggagttcccggggattacaatctgcaatttctagaccagattatttcacataaagacatgaaatgggtcggaaatgcaaatgagttaaatgcatcttacatggccgatggttatgccagaaccaaaaaggcggctgctttcttgactaccttcggggtgggtgaattatcggcagttaatggcttggctggatcatacgcagaaaacttgcctgtcgttgaaatcgttggctcgccaacatcaaaagttcaaaatgaaggaaaattcgtccaccacactttggcagatggtgacttcaagcacttcatgaaaatgcatgaacctgtaacggctgccagaactctactaactgctgagaatgcaactgtagagattgatcgtgtcttgagcgctcttttaaaggaaagaaagccagtctatattaacctgccagtagacgtcgcagcggccaaagcagagaagcctagcttaccacttaaaaaggaaaatagtacctcaaacacttcagatcaagagattcttaacaagatccaggaatctttgaaaaacgctaaaaagcccattgttataactggccatgagatcatatcatttggtttggagaaaacagtgacccagttcattagtaagacgaaactgccaataaccactctaaatttcggtaagtcctccgttgatgaagcgttgcctagcttcttgggtatttacaacggcaccttgtcagaacccaatctgaaagaatttgttgaatctgcagactttatattgatgttgggagtaaagttgactgacagctctactggtgcttttacacaccatctgaatgaaaacaagatgatatctcttaatatcgatgaaggtaagatattcaatgaaagaatacagaacttcgacttcgagagtctaatttcttccttactggacttaagtgaaatcgagtataaaggtaagtacattgacaaaaagcaggaagattttgttccgagcaacgcgctacttagtcaagatagattatggcaagctgttgaaaatctgacacaatccaatgagacaattgttgccgaacaaggtacctccttttttggcgcttcttccatcttcctaaagtccaagtctcatttcatagggcagccattgtggggtagcatcggttacacctttcctgctgctctagggtcccaaattgctgataaagaaagtagacatttgttgtttataggagacggatctttacaattgacagttcaagagttaggtttagccatcagagagaagattaatcctatctgcttcataataaacaacgatggctatacagttgagagggaaattcatggacctaatcaatcttataatgatataccaatgtggaattatagcaagttacctgaatcttttggggctaccgaggatcgtgttgtttctaagattgtaagaaccgaaaatgaatttgtttctgttatgaaggaagcacaagcggaccctaacaggatgtactggattgagttaattcttgctaaggagggtgcgccaaaggttctaaagaagatgggtaagttgttcgccgaacaaaacaaatccgtgacacatggttataatgtgcagcgatacaatcagttacgtaaaaattttggattttatagagcatattcttcactaagaggttgtaagagcgttttcagacgtatataggctaggtcatgtaattagttatgtcacgcttacattcacgccctccccccacatccgctctaaccgaaaaggaaggagttagacaacctgaagtctaggtccctatttatttttttatagttatgttagtattaagaacgttatttatatttcaaatttttcttttttttctgtacagacgcgtgtacgcatgtaacattatactgaaaaccttgcttgagaaggttttgggacgctcgaaggctttaatttgcgggtgtacaatatggacttcctcttttctggcaaccaaacccatacatcgggattcctataataccttcgttggtctccctaacatgtaggtggcggaggggagatatacaatagaacagataccagacaagacataatgggctaaacaagactacaccaattacactgcctcattgatggtggtacataacgaactaatactgtagccctagacttgatagccatcatcatatcgaagtttcactaccctttttccatttgccatctattgaagtaataataggcgcatgcaacttcttttctttttttttcttttctctctcccccgttgttgtctcaccatatccgcaatgacaaaaaaatgatggaagacactaaaggaaaaaattaacgacaaagacagcaccaacagatgtcgttgttccagagctgatgaggggtatctcgaagcacacgaaactttttccttccttcattcacgcacactactctctaatgagcaacggtatacggccttccttccagttacttgaatttgaaataaaaaaaagtttgctgtcttgctatcaagtataaatagacctgcaattattaatcttttgtttcctcgtcattgttctcgttccctttcttccttgtttctttttctgcacaatatttcaagctataccaagcatacaatcaactatctcatatacacatatgttatatccagagaaattccaaggcattggtatctccaacgcaaaggattggaagcatcctaaacttgttagtttcgaccccaaacctttcggtgaccatgacgttgatgttgagattgaagcatgtggaatatgtgggagcgattttcatattgcagtaggcaattggggccctgttccggaaaatcaaattttgggtcacgaaattattggtagggtagtgaaggtgggttcaaaatgtcacacgggtgttaagattggtgatagggttggtgtaggtgcccaagcattggcttgtttcgaatgcgaaagatgcaaaagtgataacgaacaatactgtaccaacgatcatgttctaacaatgtggactccttacaaagatggatacatatctcaaggtggatttgcatcacatgttagattgcatgagcattttgcaattcaaattccggagaatatcccatcacctttggctgcaccattattgtgtgggggaataacagtgtttagtcctttattgagaaacggttgtggacctggtaagcgtgtggggattgttggcataggtggtattggtcacatggggatattactagctaaggccatgggagccgaagtttatgcgttcagtagaggacactccaagcgtgaagacagtatgaagttaggggcggaccattatattgccatgttggaggataaaggctggaccgaacaatattcaaatgctcttgatctgttagttgtgtgtagttcttctcttagtaaagttaattttgactcgattgtgaaaataatgaagattggcggctccattgtttccattgctgctccagaagttaacgagaagctggtactaaaaccactgggtctgatgggggtatctatctcatcttctgctatcggttcaagaaaagaaatagaacagctattaaagctagtcagcgagaaaaatgtgaagatttgggtagagaagctacccataagcgaggagggtgtatctcacgcatttacgagaatggaatccggagatgttaagtacaggtttacacttgtagactatgacaagaaattccataagtgagcggccgcataacaatactgacagtactaaataattgcctacttggcttcacatacgttgcatacgtcgatatagataataatgataatgacagcaggattatcgtaatacgtaatagttgaaaatctcaaaaatgtgtgggtcattacgtaaataatgataggaatgggattcttctatttttcctttttccattctagcagccgtcgggaaaacgtggcatcctctctttcgggctcaattggagtcacgctgccgtgagcatcctctctttccatatctaacaactgagcacgtaaccaatggaaaagcatgagcttagcgttgctccaaaaaagtattggatggttaataccatttgtctgttctcttctgactttgactcctcaaaaaaaaaaaatctacaatcaacagatcgcttcaattacgccctcacaaaaacttttttccttcttcttcgcccacgttaaattttatccctcatgttgtctaacggatttctgcacttgatttattataaaaagacaaagacataatacttctctatcaatttcagttattgttcttccttgcgttattcttctgttcttctttttcttttgtcatatataaccataaccaagtaatacatattcaaactcgagatgtccaaagctacttataaagaaagggctgcaacccatccatccccagtggcagctaaactgtttaacataatgcacgaaaaacaaactaacttatgcgcatcattagatgtaagaactactaaagagctactggagttggttgaggctttaggtccaaaaatttgtttgttgaagacacatgttgacatattaacagatttttctatggagggtaccgttaagcctctgaaagcgttaagcgcgaaatataactttcttttatttgaagaccgtaagtttgctgatattggaaatactgttaagttgcaatatagcgcaggagtttatagaattgccgaatgggctgacattacgaatgcccacggtgttgtaggtcctggcattgtgtctggattgaaacaagcggcagaggaagtgactaaggaaccaagaggtttactaatgctggcggaattatcttgcaaaggctctctagccaccggtgaatatacaaaaggtactgtggatattgcaaagtctgataaggacttcgtaatcggttttattgcacaaagagatatgggaggtcgtgagaattcaaaatgaagtgaagttcctatactttctagagaataggaacttctatagtgagtcgaataagggcgacacaaaatttattctaaatgcataataaatactgataacatcttatagtttgtattatattttgtattatcgttgacatgtataattttgatatcaaaaactgattttccctttattattttcgagatttattttcttaattctctttaacaaactagaaatattgtatatacaaaaaatcataaataatagatgaatagtttaattataggtgttcatcaatcgaaaaagcaacgtatcttatttaaagtgcgttgcttttttctcatttataaggttaaataattctcatatatcaagcaaagtgacaggcgcccttaaatattctgacaaatgctctttccctaaactccccccataaaaaaacccgccgaagcgggtttttacgttatttgcggattaacgattactcgttatcagaaccgcccagggggcccgagcttaagactggccgtcgttttacaacacagaaagagtttgtagaaacgcaaaaaggccatccgtcaggggccttctgcttagtttgatgcctggcagttccctactctcgccttccgcttcctcgctcactgactcgctgcgctcggtcgttcggctgcggcgagcggtatcagctcactcaaaggcggtaatacggttatccacagaatcaggggataacgcaggaaagaacatgtgagcaaaaggccagcaaaaggccaggaaccgtaaaaaggccgcgttgctggcgtttttccataggctccgcccccctgacgagcatcacaaaaatcgacgctcaagtcagaggtggcgaaacccgacaggactataaagataccaggcgtttccccctggaagctccctcgtgcgctctcctgttccgaccctgccgcttaccggatacctgtccgcctttctcccttcgggaagcgtggcgctttctcatagctcacgctgtaggtatctcagttcggtgtaggtcgttcgctccaagctgggctgtgtgcacgaaccccccgttcagcccgaccgctgcgccttatccggtaactatcgtcttgagtccaacccggtaagacacgacttatcgccactggcagcagccactggtaacaggattagcagagcgaggtatgtaggcggtgctacagagttcttgaagtggtgggctaactacggctacactagaagaacagtatttggtatctgcgctctgctgaagccagttaccttcggaaaaagagttggtagctcttgatccggcaaacaaaccaccgctggtagcggtggtttttttgtttgcaagcagcagattacgcgcagaaaaaaaggatctcaagaagatcctttgatcttttctacggggtctgacgctcagtggaacgacgcgcgcgtaactcacgttaagggattttggtcatgagcttgcgccgtcccgtcaagtcagcgtaatgctctgcttt

SEQ ID NO: 9 - DNA, 11029 bp, Artificial Sequence
  Plasmid pGV7001
tagaaaaactcatcgagcatcaaatgaaactgcaatttattcatatcaggattatcaataccatatttttgaaaaagccgtttctgtaatgaaggagaaaactcaccgaggcagttccataggatggcaagatcctggtatcggtctgcgattccgactcgtccaacatcaatacaacctattaatttcccctcgtcaaaaataaggttatcaagtgagaaatcaccatgagtgacgactgaatccggtgagaatggcaaaagtttatgcatttctttccagacttgttcaacaggccagccattacgctcgtcatcaaaatcactcgcatcaaccaaaccgttattcattcgtgattgcgcctgagcgaggcgaaatacgcgatcgctgttaaaaggacaattacaaacaggaatcgagtgcaaccggcgcaggaacactgccagcgcatcaacaatattttcacctgaatcaggatattcttctaatacctggaacgctgtttttccggggatcgcagtggtgagtaaccatgcatcatcaggagtacggataaaatgcttgatggtcggaagtggcataaattccgtcagccagtttagtctgaccatctcatctgtaacatcattggcaacgctacctttgccatgtttcagaaacaactctggcgcatcgggcttcccatacaagcgatagattgtcgcacctgattgcccgacattatcgcgagcccatttatacccatataaatcagcatccatgttggaatttaatcgcggcctcgacgtttcccgttgaatatggctcatattcttcctttttcaatattattgaagcatttatcagggttattgtctcatgagcggatacatatttgaatgtatttagaaaaataaacaaataggggtcagtgttacaaccaattaaccaattctgaacattatcgcgagcccatttatacctgaatatggctcataacaccccttgtttgcctggcggcagtagcgcggtggtcccacctgaccccatgccgaactcagaagtgaaacgccgtagcgccgatggtagtgtggggactccccatgcgagagtagggaactgccaggcatcaaataaaacgaaaggctcagtcgaaagactgggcctttcgcccgggctaattagggggtgtcgcccttattcgactctatagtgaagttcctattctctagaaagtataggaacttctgaagtggggaagcaaggcagaaactaacttcttcttcatgtaataaacacaccccgcgtttatttacctatctctaaacttcaacaccttatatcataactaatatttcttgagataagcacactgcacccataccttccttaaaaacgtagcttccagtttttggtggttccggcttccttcccgattccgcccgctaaacgcatatttttgttgcctggtggcatttgcaaaatgcataacctatgcatttaaaagattatgtatgctcttctgacttttcgtgtgatgaggctcgtggaaaaaatgaataatttatgaatttgagaacaattttgtgttgttacggtattttactatggaataatcaatcaattgaggattttatgcaaatatcgtttgaatatttttccgaccctttgagtacttttcttcataattgcataatattgtccgctgcccctttttctgttagacggtgtcttgatctacttgctatcgttcaacaccaccttattttctaactattttttttttagctcatttgaatcagcttatggtgatggcacatttttgcataaacctagctgtcctcgttgaacataggaaaaaaaaatatataaacaaggctctttcactctccttgcaatcagatttgggtttgttccctttattttcatatttcttgtcatattcctttctcaattattattttctactcataacctcacgcaaaataacacagtcaaatcaatcaaagtcgagatgctttcactacgtcaatctataagatttttcaagccagccacaagaactttgtgtagctctagatatctgcttatgttgactaaagctacaaaagagcagaaatcattggtgaaaaataggggtgcagaacttgttgtggactgtttggtagaacagggcgtaacacatgtttttggtatcccaggtgcaaaaatcgacgccgtgtttgatgcattacaagacaagggtccagaaattattgttgctagacatgagcaaaatgccgcatttatggcgcaagctgtaggtaggcttacaggtaaacctggtgttgtcctagttacgtctggcccaggagcctccaatttagcaactggtctattgacagctaatactgagggagatcctgtagttgcgttagccggtaatgtaattagagctgataggcttaagagaactcaccagtctctagacaacgctgctttattccaaccgatcaccaagtactcagtagaggtacaagacgtaaagaatatacctgaagctgtgacaaacgcatttcgtatagcttctgctggtcaggctggtgccgcgtttgtttcttttcctcaagacgttgtcaatgaagtgaccaatactaaaaacgttagagcggttgcagcccctaaactaggtccagccgcagacgacgcaattagcgctgcaattgctaaaattcagacggcgaaactaccagtagtccttgtcggtatgaagggcggaagaccagaagcaataaaagctgttcgtaagttattgaagaaagtccaattacctttcgttgagacttaccaagcagcaggtactttatctagagatttagaggatcagtattttggaaggataggtctatttagaaaccaaccaggagatttactattagaacaagctgatgttgtacttactatcggttatgatcctatagagtatgacccaaagttttggaacataaatggggatagaacaattatacatctagacgagataatcgccgacatcgatcacgcttatcaaccagatttagaactaatcggagatatcccgtcaacaatcaatcatattgaacatgatgctgtaaaggttgagttcgctgaacgtgagcagaaaatcttatctgatctaaagcaatatatgcatgagggtgaacaagttccagcagactggaaatctgaccgtgcacatcctttggaaatcgttaaggaactaagaaatgcggtcgatgatcatgtgactgttacatgtgatatcggttcacatgcaatttggatgtcacgttattttaggagctacgaaccattaactttaatgatatctaacgggatgcaaactctgggggttgcacttccttgggctattggcgctagtttagttaagcccggtgagaaggtggtatcggtatcaggtgatggtggctttctgttttcggctatggaattagaaactgcagtccgtttaaaagctcccattgtgcatattgtctggaatgattctacttacgacatggttgcttttcaacagttgaagaaatacaatagaacttcggctgtagactttggtaacatcgatattgtgaaatatgctgagtcttttggcgcaacaggcctgagggtggaaagtccagatcagttagctgatgtgttgagacaagggatgaatgccgagggaccggtaatcatagatgtgccagttgactactcagacaatattaatttggcttctgataaacttcctaaagagtttggcgagctaatgaagaccaaagccttataaggatccataaaaaacacgctttttcagttcgagtttatcattatcaatactgccatttcaaagaatacgtaaataattaatagtagtgattttcctaactttatttagtcaaaaaattagccttttaattctgctgtaacccgtacatgcccaaaatagggggcgggttacacagaatatataacatcgtaggtgtctgggtgaacagtttattcctggcatccactaaatataatggagcccgctttttaagctggcatccagaaaaaaaaagaatcccagcaccaaaatattgttttcttcaccaaccatcagttcataggtccattctcttagcgcaactacagagaacaggggcacaaacaggcaaaaaacgggcacaacctcaatggagtgatgcaacctgcctggagtaaatgatgacacaaggcaattgacccacgcatgtatctatctcattttcttacaccttctattaccttctgctctctctgatttggaaaaagctgaaaaaaaaggttgaaaccagttccctgaaattattcccctacttgactaataagtatataaagacggtaggtattgattgtaattctgtaaatctatttcttaaacttcttaaattctacttttatagttagtcttttttttagttttaaaacaccaagaacttagtttcgaataaacacacataaacaaacaaaaagcttatgtatactgttggagattatttgttagatagattgcatgaactaggcattgaagaaattttcggagttcccggggattacaatctgcaatttctagaccagattatttcacataaagacatgaaatgggtcggaaatgcaaatgagttaaatgcatcttacatggccgatggttatgccagaaccaaaaaggcggctgctttcttgactaccttcggggtgggtgaattatcggcagttaatggcttggctggatcatacgcagaaaacttgcctgtcgttgaaatcgttggctcgccaacatcaaaagttcaaaatgaaggaaaattcgtccaccacactttggcagatggtgacttcaagcacttcatgaaaatgcatgaacctgtaacggctgccagaactctactaactgctgagaatgcaactgtagagattgatcgtgtcttgagcgctcttttaaaggaaagaaagccagtctatattaacctgccagtagacgtcgcagcggccaaagcagagaagcctagcttaccacttaaaaaggaaaatagtacctcaaacacttcagatcaagagattcttaacaagatccaggaatctttgaaaaacgctaaaaagcccattgttataactggccatgagatcatatcatttggtttggagaaaacagtgacccagttcattagtaagacgaaactgccaataaccactctaaatttcggtaagtcctccgttgatgaagcgttgcctagcttcttgggtatttacaacggcaccttgtcagaacccaatctgaaagaatttgttgaatctgcagactttatattgatgttgggagtaaagttgactgacagctctactggtgcttttacacaccatctgaatgaaaacaagatgatatctcttaatatcgatgaaggtaagatattcaatgaaagaatacagaacttcgacttcgagagtctaatttcttccttactggacttaagtgaaatcgagtataaaggtaagtacattgacaaaaagcaggaagattttgttccgagcaacgcgctacttagtcaagatagattatggcaagctgttgaaaatctgacacaatccaatgagacaattgttgccgaacaaggtacctccttttttggcgcttcttccatcttcctaaagtccaagtctcatttcatagggcagccattgtggggtagcatcggttacacctttcctgctgctctagggtcccaaattgctgataaagaaagtagacatttgttgtttataggagacggatctttacaattgacagttcaagagttaggtttagccatcagagagaagattaatcctatctgcttcataataaacaacgatggctatacagttgagagggaaattcatggacctaatcaatcttataatgatataccaatgtggaattatagcaagttacctgaatcttttggggctaccgaggatcgtgttgtttctaagattgtaagaaccgaaaatgaatttgtttctgttatgaaggaagcacaagcggaccctaacaggatgtactggattgagttaattcttgctaaggagggtgcgccaaaggttctaaagaagatgggtaagttgttcgccgaacaaaacaaatccgtgacacatggttataatgtgcagcgatacaatcagttacgtaaaaattttggattttatagagcatattcttcactaagaggttgtaagagcgttttcagacgtatataggctaggtcatgtaattagttatgtcacgcttacattcacgccctccccccacatccgctctaaccgaaaaggaaggagttagacaacctgaagtctaggtccctatttatttttttatagttatgttagtattaagaacgttatttatatttcaaatttttcttttttttctgtacagacgcgtgtacgcatgtaacattatactgaaaaccttgcttgagaaggttttgggacgctcgaaggctttaatttgcgggtgtacaatatggacttcctcttttctggcaaccaaacccatacatcgggattcctataataccttcgttggtctccctaacatgtaggtggcggaggggagatatacaatagaacagataccagacaagacataatgggctaaacaagactacaccaattacactgcctcattgatggtggtacataacgaactaatactgtagccctagacttgatagccatcatcatatcgaagtttcactaccctttttccatttgccatctattgaagtaataataggcgcatgcaacttcttttctttttttttcttttctctctcccccgttgttgtctcaccatatccgcaatgacaaaaaaatgatggaagacactaaaggaaaaaattaacgacaaagacagcaccaacagatgtcgttgttccagagctgatgaggggtatctcgaagcacacgaaactttttccttccttcattcacgcacactactctctaatgagcaacggtatacggccttccttccagttacttgaatttgaaataaaaaaaagtttgctgtcttgctatcaagtataaatagacctgcaattattaatcttttgtttcctcgtcattgttctcgttccctttcttccttgtttctttttctgcacaatatttcaagctataccaagcatacaatcaactatctcatatacacatatgttatatccagagaaattccaaggcattggtatctccaacgcaaaggattggaagcatcctaaacttgttagtttcgaccccaaacctttcggtgaccatgacgttgatgttgagattgaagcatgtggaatatgtgggagcgattttcatattgcagtaggcaattggggccctgttccggaaaatcaaattttgggtcacgaaattattggtagggtagtgaaggtgggttcaaaatgtcacacgggtgttaagattggtgatagggttggtgtaggtgcccaagcattggcttgtttcgaatgcgaaagatgcaaaagtgataacgaacaatactgtaccaacgatcatgttctaacaatgtggactccttacaaagatggatacatatctcaaggtggatttgcatcacatgttagattgcatgagcattttgcaattcaaattccggagaatatcccatcacctttggctgcaccattattgtgtgggggaataacagtgtttagtcctttattgagaaacggttgtggacctggtaagcgtgtggggattgttggcataggtggtattggtcacatggggatattactagctaaggccatgggagccgaagtttatgcgttcagtagaggacactccaagcgtgaagacagtatgaagttaggggcggaccattatattgccatgttggaggataaaggctggaccgaacaatattcaaatgctcttgatctgttagttgtgtgtagttcttctcttagtaaagttaattttgactcgattgtgaaaataatgaagattggcggctccattgtttccattgctgctccagaagttaacgagaagctggtactaaaaccactgggtctgatgggggtatctatctcatcttctgctatcggttcaagaaaagaaatagaacagctattaaagctagtcagcgagaaaaatgtgaagatttgggtagagaagctacccataagcgaggagggtgtatctcacgcatttacgagaatggaatccggagatgttaagtacaggtttacacttgtagactatgacaagaaattccataagtgagcggccgcataacaatactgacagtactaaataattgcctacttggcttcacatacgttgcatacgtcgatatagataataatgataatgacagcaggattatcgtaatacgtaatagttgaaaatctcaaaaatgtgtgggtcattacgtaaataatgataggaatgggattcttctatttttcctttttccattctagcagccgtcgggaaaacgtggcatcctctctttcgggctcaattggagtcacgctgccgtgagcatcctctctttccatatctaacaactgagcacgtaaccaatggaaaagcatgagcttagcgttgctccaaaaaagtattggatggttaataccatttgtctgttctcttctgactttgactcctcaaaaaaaaaaaatctacaatcaacagatcgcttcaattacgccctcacaaaaacttttttccttcttcttcgcccacgttaaattttatccctcatgttgtctaacggatttctgcacttgatttattataaaaagacaaagacataatacttctctatcaatttcagttattgttcttccttgcgttattcttctgttcttctttttcttttgtcatatataaccataaccaagtaatacatattcaaactcgagatgtccaaagctacttataaagaaagggctgcaacccatccatccccagtggcagctaaactgtttaacataatgcacgaaaaacaaactaacttatgcgcatcattagatgtaagaactactaaagagctactggagttggttgaggctttaggtccaaaaatttgtttgttgaagacacatgttgacatattaacagatttttctatggagggtaccgttaagcctctgaaagcgttaagcgcgaaatataactttcttttatttgaagaccgtaagtttgctgatattggaaatactgttaagttgcaatatagcgcaggagtttatagaattgccgaatgggctgacattacgaatgcccacggtgttgtaggtcctggcattgtgtctggattgaaacaagcggcagaggaagtgactaaggaaccaagaggtttactaatgctggcggaattatcttgcaaaggctctctagccaccggtgaatatacaaaaggtactgtggatattgcaaagtctgataaggacttcgtaatcggttttattgcacaaagagatatgggaggtcgtgagaattcaaaatgaagtgaagttcctatactttctagagaataggaacttctatagtgagtcgaataagggcgacacaaaatttattctaaatgcataataaatactgataacatcttatagtttgtattatattttgtattatcgttgacatgtataattttgatatcaaaaactgattttccctttattattttcgagatttattttcttaattctctttaacaaactagaaatattgtatatacaaaaaatcataaataatagatgaatagtttaattataggtgttcatcaatcgaaaaagcaacgtatcttatttaaagtgcgttgcttttttctcatttataaggttaaataattctcatatatcaagcaaagtgacaggcgcccttaaatattctgacaaatgctctttccctaaactccccccataaaaaaacccgccgaagcgggtttttacgttatttgcggattaacgattactcgttatcagaaccgcccagggggcccgagcttaagactggccgtcgttttacaacacagaaagagtttgtagaaacgcaaaaaggccatccgtcaggggccttctgcttagtttgatgcctggcagttccctactctcgccttccgcttcctcgctcactgactcgctgcgctcggtcgttcggctgcggcgagcggtatcagctcactcaaaggcggtaatacggttatccacagaatcaggggataacgcaggaaagaacatgtgagcaaaaggccagcaaaaggccaggaaccgtaaaaaggccgcgttgctggcgtttttccataggctccgcccccctgacgagcatcacaaaaatcgacgctcaagtcagaggtggcgaaacccgacaggactataaagataccaggcgtttccccctggaagctccctcgtgcgctctcctgttccgaccctgccgcttaccggatacctgtccgcctttctcccttcgggaagcgtggcgctttctcatagctcacgctgtaggtatctcagttcggtgtaggtcgttcgctccaagctgggctgtgtgcacgaaccccccgttcagcccgaccgctgcgccttatccggtaactatcgtcttgagtccaacccggtaagacacgacttatcgccactggcagcagccactggtaacaggattagcagagcgaggtatgtaggcggtgctacagagttcttgaagtggtgggctaactacggctacactagaagaacagtatttggtatctgcgctctgctgaagccagttaccttcggaaaaagagttggtagctcttgatccggcaaacaaaccaccgctggtagcggtggtttttttgtttgcaagcagcagattacgcgcagaaaaaaaggatctcaagaagatcctttgatcttttctacggggtctgacgctcagtggaacgacgcgcgcgtaactcacgttaagggattttggtcatgagcttgcgccgtcccgtcaagtcagcgtaatgctctgcttt

SEQ ID NO: 10 - DNA, 11113 bp, Artificial Sequence
  Plasmid pGV7101
tagaaaaactcatcgagcatcaaatgaaactgcaatttattcatatcaggattatcaataccatatttttgaaaaagccgtttctgtaatgaaggagaaaactcaccgaggcagttccataggatggcaagatcctggtatcggtctgcgattccgactcgtccaacatcaatacaacctattaatttcccctcgtcaaaaataaggttatcaagtgagaaatcaccatgagtgacgactgaatccggtgagaatggcaaaagtttatgcatttctttccagacttgttcaacaggccagccattacgctcgtcatcaaaatcactcgcatcaaccaaaccgttattcattcgtgattgcgcctgagcgaggcgaaatacgcgatcgctgttaaaaggacaattacaaacaggaatcgagtgcaaccggcgcaggaacactgccagcgcatcaacaatattttcacctgaatcaggatattcttctaatacctggaacgctgtttttccggggatcgcagtggtgagtaaccatgcatcatcaggagtacggataaaatgcttgatggtcggaagtggcataaattccgtcagccagtttagtctgaccatctcatctgtaacatcattggcaacgctacctttgccatgtttcagaaacaactctggcgcatcgggcttcccatacaagcgatagattgtcgcacctgattgcccgacattatcgcgagcccatttatacccatataaatcagcatccatgttggaatttaatcgcggcctcgacgtttcccgttgaatatggctcatattcttcctttttcaatattattgaagcatttatcagggttattgtctcatgagcggatacatatttgaatgtatttagaaaaataaacaaataggggtcagtgttacaaccaattaaccaattctgaacattatcgcgagcccatttatacctgaatatggctcataacaccccttgtttgcctggcggcagtagcgcggtggtcccacctgaccccatgccgaactcagaagtgaaacgccgtagcgccgatggtagtgtggggactccccatgcgagagtagggaactgccaggcatcaaataaaacgaaaggctcagtcgaaagactgggcctttcgcccgggctaattagggggtgtcgcccttattcgactctatagtgaagttcctattctctagaaagtataggaacttctgaagtggggaagcaaggcagaaactaacttcttcttcatgtaataaacacaccccgcgtttatttacctatctctaaacttcaacaccttatatcataactaatatttcttgagataagcacactgcacccataccttccttaaaaacgtagcttccagtttttggtggttccggcttccttcccgattccgcccgctaaacgcatatttttgttgcctggtggcatttgcaaaatgcataacctatgcatttaaaagattatgtatgctcttctgacttttcgtgtgatgaggctcgtggaaaaaatgaataatttatgaatttgagaacaattttgtgttgttacggtattttactatggaataatcaatcaattgaggattttatgcaaatatcgtttgaatatttttccgaccctttgagtacttttcttcataattgcataatattgtccgctgcccctttttctgttagacggtgtcttgatctacttgctatcgttcaacaccaccttattttctaactattttttttttagctcatttgaatcagcttatggtgatggcacatttttgcataaacctagctgtcctcgttgaacataggaaaaaaaaatatataaacaaggctctttcactctccttgcaatcagatttgggtttgttccctttattttcatatttcttgtcatattcctttctcaattattattttctactcataacctcacgcaaaataacacagtcaaatcaatcaaagtcgagatgctttcactacgtcaatctataagatttttcaagccagccacaagaactttgtgtagctctagatatctgcttatgttgactaaagctacaaaagagcagaaatcattggtgaaaaataggggtgcagaacttgttgtggactgtttggtagaacagggcgtaacacatgtttttggtatcccaggtgcaaaaatcgacgccgtgtttgatgcattacaagacaagggtccagaaattattgttgctagacatgagcaaaatgccgcatttatggcgcaagctgtaggtaggcttacaggtaaacctggtgttgtcctagttacgtctggcccaggagcctccaatttagcaactggtctattgacagctaatactgagggagatcctgtagttgcgttagccggtaatgtaattagagctgataggcttaagagaactcaccagtctctagacaacgctgctttattccaaccgatcaccaagtactcagtagaggtacaagacgtaaagaatatacctgaagctgtgacaaacgcatttcgtatagcttctgctggtcaggctggtgccgcgtttgtttcttttcctcaagacgttgtcaatgaagtgaccaatactaaaaacgttagagcggttgcagcccctaaactaggtccagccgcagacgacgcaattagcgctgcaattgctaaaattcagacggcgaaactaccagtagtccttgtcggtatgaagggcggaagaccagaagcaataaaagctgttcgtaagttattgaagaaagtccaattacctttcgttgagacttaccaagcagcaggtactttatctagagatttagaggatcagtattttggaaggataggtctatttagaaaccaaccaggagatttactattagaacaagctgatgttgtacttactatcggttatgatcctatagagtatgacccaaagttttggaacataaatggggatagaacaattatacatctagacgagataatcgccgacatcgatcacgcttatcaaccagatttagaactaatcggagatatcccgtcaacaatcaatcatattgaacatgatgctgtaaaggttgagttcgctgaacgtgagcagaaaatcttatctgatctaaagcaatatatgcatgagggtgaacaagttccagcagactggaaatctgaccgtgcacatcctttggaaatcgttaaggaactaagaaatgcggtcgatgatcatgtgactgttacatgtgatatcggttcacatgcaatttggatgtcacgttattttaggagctacgaaccattaactttaatgatatctaacgggatgcaaactctgggggttgcacttccttgggctattggcgctagtttagttaagcccggtgagaaggtggtatcggtatcaggtgatggtggctttctgttttcggctatggaattagaaactgcagtccgtttaaaagctcccattgtgcatattgtctggaatgattctacttacgacatggttgcttttcaacagttgaagaaatacaatagaacttcggctgtagactttggtaacatcgatattgtgaaatatgctgagtcttttggcgcaacaggcctgagggtggaaagtccagatcagttagctgatgtgttgagacaagggatgaatgccgagggaccggtaatcatagatgtgccagttgactactcagacaatattaatttggcttctgataaacttcctaaagagtttggcgagctaatgaagaccaaagccttataaggatccataaaaaacacgctttttcagttcgagtttatcattatcaatactgccatttcaaagaatacgtaaataattaatagtagtgattttcctaactttatttagtcaaaaaattagccttttaattctgctgtaacccgtacatgcccaaaatagggggcgggttacacagaatatataacatcgtaggtgtctgggtgaacagtttattcctggcatccactaaatataatggagcccgctttttaagctggcatccagaaaaaaaaagaatcccagcaccaaaatattgttttcttcaccaaccatcagttcataggtccattctcttagcgcaactacagagaacaggggcacaaacaggcaaaaaacgggcacaacctcaatggagtgatgcaacctgcctggagtaaatgatgacacaaggcaattgacccacgcatgtatctatctcattttcttacaccttctattaccttctgctctctctgatttggaaaaagctgaaaaaaaaggttgaaaccagttccctgaaattattcccctacttgactaataagtatataaagacggtaggtattgattgtaattctgtaaatctatttcttaaacttcttaaattctacttttatagttagtcttttttttagttttaaaacaccaagaacttagtttcgaataaacacacataaacaaacaaaaagcttatgtatactgttggagattatttgttagatagattgcatgaactaggcattgaagaaattttcggagttcccggggattacaatctgcaatttctagaccagattatttcacataaagacatgaaatgggtcggaaatgcaaatgagttaaatgcatcttacatggccgatggttatgccagaaccaaaaaggcggctgctttcttgactaccttcggggtgggtgaattatcggcagttaatggcttggctggatcatacgcagaaaacttgcctgtcgttgaaatcgttggctcgccaacatcaaaagttcaaaatgaaggaaaattcgtccaccacactttggcagatggtgacttcaagcacttcatgaaaatgcatgaacctgtaacggctgccagaactctactaactgctgagaatgcaactgtagagattgatcgtgtcttgagcgctcttttaaaggaaagaaagccagtctatattaacctgccagtagacgtcgcagcggccaaagcagagaagcctagcttaccacttaaaaaggaaaatagtacctcaaacacttcagatcaagagattcttaacaagatccaggaatctttgaaaaacgctaaaaagcccattgttataactggccatgagatcatatcatttggtttggagaaaacagtgacccagttcattagtaagacgaaactgccaataaccactctaaatttcggtaagtcctccgttgatgaagcgttgcctagcttcttgggtatttacaacggcaccttgtcagaacccaatctgaaagaatttgttgaatctgcagactttatattgatgttgggagtaaagttgactgacagctctactggtgcttttacacaccatctgaatgaaaacaagatgatatctcttaatatcgatgaaggtaagatattcaatgaaagaatacagaacttcgacttcgagagtctaatttcttccttactggacttaagtgaaatcgagtataaaggtaagtacattgacaaaaagcaggaagattttgttccgagcaacgcgctacttagtcaagatagattatggcaagctgttgaaaatctgacacaatccaatgagacaattgttgccgaacaaggtacctccttttttggcgcttcttccatcttcctaaagtccaagtctcatttcatagggcagccattgtggggtagcatcggttacacctttcctgctgctctagggtcccaaattgctgataaagaaagtagacatttgttgtttataggagacggatctttacaattgacagttcaagagttaggtttagccatcagagagaagattaatcctatctgcttcataataaacaacgatggctatacagttgagagggaaattcatggacctaatcaatcttataatgatataccaatgtggaattatagcaagttacctgaatcttttggggctaccgaggatcgtgttgtttctaagattgtaagaaccgaaaatgaatttgtttctgttatgaaggaagcacaagcggaccctaacaggatgtactggattgagttaattcttgctaaggagggtgcgccaaaggttctaaagaagatgggtaagttgttcgccgaacaaaacaaatccgtgacacatggttataatgtgcagcgatacaatcagttacgtaaaaattttggattttatagagcatattcttcactaagaggttgtaagagcgttttcagacgtatataggctaggtcatgtaattagttatgtcacgcttacattcacgccctccccccacatccgctctaaccgaaaaggaaggagttagacaacctgaagtctaggtccctatttatttttttatagttatgttagtattaagaacgttatttatatttcaaatttttcttttttttctgtacagacgcgtgtacgcatgtaacattatactgaaaaccttgcttgagaaggttttgggacgctcgaaggctttaatttgcgggtgtacaatatggacttcctcttttctggcaaccaaacccatacatcgggattcctataataccttcgttggtctccctaacatgtaggtggcggaggggagatatacaatagaacagataccagacaagacataatgggctaaacaagactacaccaattacactgcctcattgatggtggtacataacgaactaatactgtagccctagacttgatagccatcatcatatcgaagtttcactaccctttttccatttgccatctattgaagtaataataggcgcatgcaacttcttttctttttttttcttttctctctcccccgttgttgtctcaccatatccgcaatgacaaaaaaatgatggaagacactaaaggaaaaaattaacgacaaagacagcaccaacagatgtcgttgttccagagctgatgaggggtatctcgaagcacacgaaactttttccttccttcattcacgcacactactctctaatgagcaacggtatacggccttccttccagttacttgaatttgaaataaaaaaaagtttgctgtcttgctatcaagtataaatagacctgcaattattaatcttttgtttcctcgtcattgttctcgttccctttcttccttgtttctttttctgcacaatatttcaagctataccaagcatacaatcaactatctcatatacacatatgttgagaacgtcaacattgttcaccaggcgtgtccaaccaagcctattttctagaaacattcttagattgcaatccacagctgcattatatccagagaaattccaaggcattggtatctccaacgcaaaggattggaagcatcctaaacttgttagtttcgaccccaaacctttcggtgaccatgacgttgatgttgagattgaagcatgtggaatatgtgggagcgattttcatattgcagtaggcaattggggccctgttccggaaaatcaaattttgggtcacgaaattattggtagggtagtgaaggtgggttcaaaatgtcacacgggtgttaagattggtgatagggttggtgtaggtgcccaagcattggcttgtttcgaatgcgaaagatgcaaaagtgataacgaacaatactgtaccaacgatcatgttctaacaatgtggactccttacaaagatggatacatatctcaaggtggatttgcatcacatgttagattgcatgagcattttgcaattcaaattccggagaatatcccatcacctttggctgcaccattattgtgtgggggaataacagtgtttagtcctttattgagaaacggttgtggacctggtaagcgtgtggggattgttggcataggtggtattggtcacatggggatattactagctaaggccatgggagccgaagtttatgcgttcagtagaggacactccaagcgtgaagacagtatgaagttaggggcggaccattatattgccatgttggaggataaaggctggaccgaacaatattcaaatgctcttgatctgttagttgtgtgtagttcttctcttagtaaagttaattttgactcgattgtgaaaataatgaagattggcggctccattgtttccattgctgctccagaagttaacgagaagctggtactaaaaccactgggtctgatgggggtatctatctcatcttctgctatcggttcaagaaaagaaatagaacagctattaaagctagtcagcgagaaaaatgtgaagatttgggtagagaagctacccataagcgaggagggtgtatctcacgcatttacgagaatggaatccggagatgttaagtacaggtttacacttgtagactatgacaagaaattccataagtgagcggccgcataacaatactgacagtactaaataattgcctacttggcttcacatacgttgcatacgtcgatatagataataatgataatgacagcaggattatcgtaatacgtaatagttgaaaatctcaaaaatgtgtgggtcattacgtaaataatgataggaatgggattcttctatttttcctttttccattctagcagccgtcgggaaaacgtggcatcctctctttcgggctcaattggagtcacgctgccgtgagcatcctctctttccatatctaacaactgagcacgtaaccaatggaaaagcatgagcttagcgttgctccaaaaaagtattggatggttaataccatttgtctgttctcttctgactttgactcctcaaaaaaaaaaaatctacaatcaacagatcgcttcaattacgccctcacaaaaacttttttccttcttcttcgcccacgttaaattttatccctcatgttgtctaacggatttctgcacttgatttattataaaaagacaaagacataatacttctctatcaatttcagttattgttcttccttgcgttattcttctgttcttctttttcttttgtcatatataaccataaccaagtaatacatattcaaactcgagatgtccaaagctacttataaagaaagggctgcaacccatccatccccagtggcagctaaactgtttaacataatgcacgaaaaacaaactaacttatgcgcatcattagatgtaagaactactaaagagctactggagttggttgaggctttaggtccaaaaatttgtttgttgaagacacatgttgacatattaacagatttttctatggagggtaccgttaagcctctgaaagcgttaagcgcgaaatataactttcttttatttgaagaccgtaagtttgctgatattggaaatactgttaagttgcaatatagcgcaggagtttatagaattgccgaatgggctgacattacgaatgcccacggtgttgtaggtcctggcattgtgtctggattgaaacaagcggcagaggaagtgactaaggaaccaagaggtttactaatgctggcggaattatcttgcaaaggctctctagccaccggtgaatatacaaaaggtactgtggatattgcaaagtctgataaggacttcgtaatcggttttattgcacaaagagatatgggaggtcgtgagaattcaaaatgaagtgaagttcctatactttctagagaataggaacttctatagtgagtcgaataagggcgacacaaaatttattctaaatgcataataaatactgataacatcttatagtttgtattatattttgtattatcgttgacatgtataattttgatatcaaaaactgattttccctttattattttcgagatttattttcttaattctctttaacaaactagaaatattgtatatacaaaaaatcataaataatagatgaatagtttaattataggtgttcatcaatcgaaaaagcaacgtatcttatttaaagtgcgttgcttttttctcatttataaggttaaataattctcatatatcaagcaaagtgacaggcgcccttaaatattctgacaaatgctctttccctaaactccccccataaaaaaacccgccgaagcgggtttttacgttatttgcggattaacgattactcgttatcagaaccgcccagggggcccgagcttaagactggccgtcgttttacaacacagaaagagtttgtagaaacgcaaaaaggccatccgtcaggggccttctgcttagtttgatgcctggcagttccctactctcgccttccgcttcctcgctcactgactcgctgcgctcggtcgttcggctgcggcgagcggtatcagctcactcaaaggcggtaatacggttatccacagaatcaggggataacgcaggaaagaacatgtgagcaaaaggccagcaaaaggccaggaaccgtaaaaaggccgcgttgctggcgtttttccataggctccgcccccctgacgagcatcacaaaaatcgacgctcaagtcagaggtggcgaaacccgacaggactataaagataccaggcgtttccccctggaagctccctcgtgcgctctcctgttccgaccctgccgcttaccggatacctgtccgcctttctcccttcgggaagcgtggcgctttctcatagctcacgctgtaggtatctcagttcggtgtaggtcgttcgctccaagctgggctgtgtgcacgaaccccccgttcagcccgaccgctgcgccttatccggtaactatcgtcttgagtccaacccggtaagacacgacttatcgccactggcagcagccactggtaacaggattagcagagcgaggtatgtaggcggtgctacagagttcttgaagtggtgggctaactacggctacactagaagaacagtatttggtatctgcgctctgctgaagccagttaccttcggaaaaagagttggtagctcttgatccggcaaacaaaccaccgctggtagcggtggtttttttgtttgcaagcagcagattacgcgcagaaaaaaaggatctcaagaagatcctttgatcttttctacggggtctgacgctcagtggaacgacgcgcgcgtaactcacgttaagggattttggtcatgagcttgcgccgtcccgtcaagtcagcgtaatgctctgcttt

SEQ ID NO: 11 - DNA, 10928 bp, Artificial Sequence
  Plasmid pGV9834
tagaaaaactcatcgagcatcaaatgaaactgcaatttattcatatcaggattatcaataccatatttttgaaaaagccgtttctgtaatgaaggagaaaactcaccgaggcagttccataggatggcaagatcctggtatcggtctgcgattccgactcgtccaacatcaatacaacctattaatttcccctcgtcaaaaataaggttatcaagtgagaaatcaccatgagtgacgactgaatccggtgagaatggcaaaagtttatgcatttctttccagacttgttcaacaggccagccattacgctcgtcatcaaaatcactcgcatcaaccaaaccgttattcattcgtgattgcgcctgagcgaggcgaaatacgcgatcgctgttaaaaggacaattacaaacaggaatcgagtgcaaccggcgcaggaacactgccagcgcatcaacaatattttcacctgaatcaggatattcttctaatacctggaacgctgtttttccggggatcgcagtggtgagtaaccatgcatcatcaggagtacggataaaatgcttgatggtcggaagtggcataaattccgtcagccagtttagtctgaccatctcatctgtaacatcattggcaacgctacctttgccatgtttcagaaacaactctggcgcatcgggcttcccatacaagcgatagattgtcgcacctgattgcccgacattatcgcgagcccatttatacccatataaatcagcatccatgttggaatttaatcgcggcctcgacgtttcccgttgaatatggctcatattcttcctttttcaatattattgaagcatttatcagggttattgtctcatgagcggatacatatttgaatgtatttagaaaaataaacaaataggggtcagtgttacaaccaattaaccaattctgaacattatcgcgagcccatttatacctgaatatggctcataacaccccttgtttgcctggcggcagtagcgcggtggtcccacctgaccccatgccgaactcagaagtgaaacgccgtagcgccgatggtagtgtggggactccccatgcgagagtagggaactgccaggcatcaaataaaacgaaaggctcagtcgaaagactgggcctttcgcccgggctaattagggggtgtcgcccttattcgactctatagtgaagttcctattctctagaaagtataggaacttctgaagtggggagatctcaccagtaaaacatacgcatacacatacacacatagagcaagcaagcaggctagcaaccaggaaaggctgccagtgactgctactgggtgtctaagaaccgtagggcggattattgttgcggtggttggttgcgggtggttatgcgatggtacggtgcagaatcgtacggtgttggttatggaattagtatgggtatgtgatatgtggtaatatgtgatattgggttattgtgatttggaatactgaatatcgaatatgggatatggaatatggccatggcatggtatggtatgggatgggagtattctattttattttattttattctggttcctgcgtttagggtagggtaggaagaaggtgagtgcttttgtatataagtggagtgtctggatcagttttgtggattgtgaatgttagtttcccctttaatgtatatttgtattatttgcttttgagtactcaataaccaagcacaactactagttttaaaggatccatcctcttaaacagtacaaatcgcaaagaaaagctccacacccaaaccaaataattgcagtcgagatgctttcactacgtcaatctataagatttttcaagccagccacaagaactttgtgtagctctagatatctgcttatgttgactaaagctacaaaagagcagaaatcattggtgaaaaataggggtgcagaacttgttgtggactgtttggtagaacagggcgtaacacatgtttttggtatcccaggtgcaaaaatcgacgccgtgtttgatgcattacaagacaagggtccagaaattattgttgctagacatgagcaaaatgccgcatttatggcgcaagctgtaggtaggcttacaggtaaacctggtgttgtcctagttacgtctggcccaggagcctccaatttagcaactggtctattgacagctaatactgagggagatcctgtagttgcgttagccggtaatgtaattagagctgataggcttaagagaactcaccagtctctagacaacgctgctttattccaaccgatcaccaagtactcagtagaggtacaagacgtaaagaatatacctgaagctgtgacaaacgcatttcgtatagcttctgctggtcaggctggtgccgcgtttgtttcttttcctcaagacgttgtcaatgaagtgaccaatactaaaaacgttagagcggttgcagcccctaaactaggtccagccgcagacgacgcaattagcgctgcaattgctaaaattcagacggcgaaactaccagtagtccttgtcggtatgaagggcggaagaccagaagcaataaaagctgttcgtaagttattgaagaaagtccaattacctttcgttgagacttaccaagcagcaggtactttatctagagatttagaggatcagtattttggaaggataggtctatttagaaaccaaccaggagatttactattagaacaagctgatgttgtacttactatcggttatgatcctatagagtatgacccaaagttttggaacataaatggggatagaacaattatacatctagacgagataatcgccgacatcgatcacgcttatcaaccagatttagaactaatcggagatatcccgtcaacaatcaatcatattgaacatgatgctgtaaaggttgagttcgctgaacgtgagcagaaaatcttatctgatctaaagcaatatatgcatgagggtgaacaagttccagcagactggaaatctgaccgtgcacatcctttggaaatcgttaaggaactaagaaatgcggtcgatgatcatgtgactgttacatgtgatatcggttcacatgcaatttggatgtcacgttattttaggagctacgaaccattaactttaatgatatctaacgggatgcaaactctgggggttgcacttccttgggctattggcgctagtttagttaagcccggtgagaaggtggtatcggtatcaggtgatggtggctttctgttttcggctatggaattagaaactgcagtccgtttaaaagctcccattgtgcatattgtctggaatgattctacttacgacatggttgcttttcaacagttgaagaaatacaatagaacttcggctgtagactttggtaacatcgatattgtgaaatatgctgagtcttttggcgcaacaggcctgagggtggaaagtccagatcagttagctgatgtgttgagacaagggatgaatgccgagggaccggtaatcatagatgtgccagttgactactcagacaatattaatttggcttctgataaacttcctaaagagtttggcgagctaatgaagaccaaagccttataaggatccataaaaaacacgctttttcagttcgagtttatcattatcaatactgccatttcaaagaatacgtaaataattaatagtagtgattttcctaactttatttagtcaaaaaattagccttttaattctgctgtaacccgtacatgcccaaaatagggggcgggttacacagaatatataacatcgtaggtgtctgggtgaacagtttattcctggcatccactaaatataatggagcccgctttttaagctggcatccagaaaaaaaaagaatcccagcaccaaaatattgttttcttcaccaaccatcagttcataggtccattctcttagcgcaactacagagaacaggggcacaaacaggcaaaaaacgggcacaacctcaatggagtgatgcaacctgcctggagtaaatgatgacacaaggcaattgacccacgcatgtatctatctcattttcttacaccttctattaccttctgctctctctgatttggaaaaagctgaaaaaaaaggttgaaaccagttccctgaaattattcccctacttgactaataagtatataaagacggtaggtattgattgtaattctgtaaatctatttcttaaacttcttaaattctacttttatagttagtcttttttttagttttaaaacaccaagaacttagtttcgaataaacacacataaacaaacaaaaagcttatgtatactgttggagattatttgttagatagattgcatgaactaggcattgaagaaattttcggagttcccggggattacaatctgcaatttctagaccagattatttcacataaagacatgaaatgggtcggaaatgcaaatgagttaaatgcatcttacatggccgatggttatgccagaaccaaaaaggcggctgctttcttgactaccttcggggtgggtgaattatcggcagttaatggcttggctggatcatacgcagaaaacttgcctgtcgttgaaatcgttggctcgccaacatcaaaagttcaaaatgaaggaaaattcgtccaccacactttggcagatggtgacttcaagcacttcatgaaaatgcatgaacctgtaacggctgccagaactctactaactgctgagaatgcaactgtagagattgatcgtgtcttgagcgctcttttaaaggaaagaaagccagtctatattaacctgccagtagacgtcgcagcggccaaagcagagaagcctagcttaccacttaaaaaggaaaatagtacctcaaacacttcagatcaagagattcttaacaagatccaggaatctttgaaaaacgctaaaaagcccattgttataactggccatgagatcatatcatttggtttggagaaaacagtgacccagttcattagtaagacgaaactgccaataaccactctaaatttcggtaagtcctccgttgatgaagcgttgcctagcttcttgggtatttacaacggcaccttgtcagaacccaatctgaaagaatttgttgaatctgcagactttatattgatgttgggagtaaagttgactgacagctctactggtgcttttacacaccatctgaatgaaaacaagatgatatctcttaatatcgatgaaggtaagatattcaatgaaagaatacagaacttcgacttcgagagtctaatttcttccttactggacttaagtgaaatcgagtataaaggtaagtacattgacaaaaagcaggaagattttgttccgagcaacgcgctacttagtcaagatagattatggcaagctgttgaaaatctgacacaatccaatgagacaattgttgccgaacaaggtacctccttttttggcgcttcttccatcttcctaaagtccaagtctcatttcatagggcagccattgtggggtagcatcggttacacctttcctgctgctctagggtcccaaattgctgataaagaaagtagacatttgttgtttataggagacggatctttacaattgacagttcaagagttaggtttagccatcagagagaagattaatcctatctgcttcataataaacaacgatggctatacagttgagagggaaattcatggacctaatcaatcttataatgatataccaatgtggaattatagcaagttacctgaatcttttggggctaccgaggatcgtgttgtttctaagattgtaagaaccgaaaatgaatttgtttctgttatgaaggaagcacaagcggaccctaacaggatgtactggattgagttaattcttgctaaggagggtgcgccaaaggttctaaagaagatgggtaagttgttcgccgaacaaaacaaatccgtgacacatggttataatgtgcagcgatacaatcagttacgtaaaaattttggattttatagagcatattcttcactaagaggttgtaagagcgttttcagacgtatataggctaggtcatgtaattagttatgtcacgcttacattcacgccctccccccacatccgctctaaccgaaaaggaaggagttagacaacctgaagtctaggtccctatttatttttttatagttatgttagtattaagaacgttatttatatttcaaatttttcttttttttctgtacagacgcgtgtacgcatgtaacattatactgaaaaccttgcttgagaaggttttgggacgctcgaaggctttaatttgcgggtgtacaatatggacttcctcttttctggcaaccaaacccatacatcgggattcctataataccttcgttggtctccctaacatgtaggtggcggaggggagatatacaatagaacagataccagacaagacataatgggctaaacaagactacaccaattacactgcctcattgatggtggtacataacgaactaatactgtagccctagacttgatagccatcatcatatcgaagtttcactaccctttttccatttgccatctattgaagtaataataggcgcatgcaacttcttttctttttttttcttttctctctcccccgttgttgtctcaccatatccgcaatgacaaaaaaatgatggaagacactaaaggaaaaaattaacgacaaagacagcaccaacagatgtcgttgttccagagctgatgaggggtatctcgaagcacacgaaactttttccttccttcattcacgcacactactctctaatgagcaacggtatacggccttccttccagttacttgaatttgaaataaaaaaaagtttgctgtcttgctatcaagtataaatagacctgcaattattaatcttttgtttcctcgtcattgttctcgttccctttcttccttgtttctttttctgcacaatatttcaagctataccaagcatacaatcaactatctcatatacacatatgttgagaacgtcaacattgttcaccaggcgtgtccaaccaagcctattttctagaaacattcttagattgcaatccacagctgcattatatccagagaaattccaaggcattggtatctccaacgcaaaggattggaagcatcctaaacttgttagtttcgaccccaaacctttcggtgaccatgacgttgatgttgagattgaagcatgtggaatatgtgggagcgattttcatattgcagtaggcaattggggccctgttccggaaaatcaaattttgggtcacgaaattattggtagggtagtgaaggtgggttcaaaatgtcacacgggtgttaagattggtgatagggttggtgtaggtgcccaagcattggcttgtttcgaatgcgaaagatgcaaaagtgataacgaacaatactgtaccaacgatcatgttctaacaatgtggactccttacaaagatggatacatatctcaaggtggatttgcatcacatgttagattgcatgagcattttgcaattcaaattccggagaatatcccatcacctttggctgcaccattattgtgtgggggaataacagtgtttagtcctttattgagaaacggttgtggacctggtaagcgtgtggggattgttggcataggtggtattggtcacatggggatattactagctaaggccatgggagccgaagtttatgcgttcagtagaggacactccaagcgtgaagacagtatgaagttaggggcggaccattatattgccatgttggaggataaaggctggaccgaacaatattcaaatgctcttgatctgttagttgtgtgtagttcttctcttagtaaagttaattttgactcgattgtgaaaataatgaagattggcggctccattgtttccattgctgctccagaagttaacgagaagctggtactaaaaccactgggtctgatgggggtatctatctcatcttctgctatcggttcaagaaaagaaatagaacagctattaaagctagtcagcgagaaaaatgtgaagatttgggtagagaagctacccataagcgaggagggtgtatctcacgcatttacgagaatggaatccggagatgttaagtacaggtttacacttgtagactatgacaagaaattccataagtgagcggccgcataacaatactgacagtactaaataattgcctacttggcttcacatacgttgcatacgtcgatatagataataatgataatgacagcaggattatcgtaatacgtaatagttgaaaatctcaaaaatgtgtgggtcattacgtaaataatgataggaatgggattcttctatttttcctttttccattctagcagccgtcgggaaaacgtggcatcctctctttcgggctcaattggagtcacgctgccgtgagcatcctctctttccatatctaacaactgagcacgtaaccaatggaaaagcatgagcttagcgttgctccaaaaaagtattggatggttaataccatttgtctgttctcttctgactttgactcctcaaaaaaaaaaaatctacaatcaacagatcgcttcaattacgccctcacaaaaacttttttccttcttcttcgcccacgttaaattttatccctcatgttgtctaacggatttctgcacttgatttattataaaaagacaaagacataatacttctctatcaatttcagttattgttcttccttgcgttattcttctgttcttctttttcttttgtcatatataaccataaccaagtaatacatattcaaactcgagatgtccaaagctacttataaagaaagggctgcaacccatccatccccagtggcagctaaactgtttaacataatgcacgaaaaacaaactaacttatgcgcatcattagatgtaagaactactaaagagctactggagttggttgaggctttaggtccaaaaatttgtttgttgaagacacatgttgacatattaacagatttttctatggagggtaccgttaagcctctgaaagcgttaagcgcgaaatataactttcttttatttgaagaccgtaagtttgctgatattggaaatactgttaagttgcaatatagcgcaggagtttatagaattgccgaatgggctgacattacgaatgcccacggtgttgtaggtcctggcattgtgtctggattgaaacaagcggcagaggaagtgactaaggaaccaagaggtttactaatgctggcggaattatcttgcaaaggctctctagccaccggtgaatatacaaaaggtactgtggatattgcaaagtctgataaggacttcgtaatcggttttattgcacaaagagatatgggaggtcgtgagaattcaaaatgaagtgaagttcctatactttctagagaataggaacttctatagtgagtcgaataagggcgacacaaaatttattctaaatgcataataaatactgataacatcttatagtttgtattatattttgtattatcgttgacatgtataattttgatatcaaaaactgattttccctttattattttcgagatttattttcttaattctctttaacaaactagaaatattgtatatacaaaaaatcataaataatagatgaatagtttaattataggtgttcatcaatcgaaaaagcaacgtatcttatttaaagtgcgttgcttttttctcatttataaggttaaataattctcatatatcaagcaaagtgacaggcgcccttaaatattctgacaaatgctctttccctaaactccccccataaaaaaacccgccgaagcgggtttttacgttatttgcggattaacgattactcgttatcagaaccgcccagggggcccgagcttaagactggccgtcgttttacaacacagaaagagtttgtagaaacgcaaaaaggccatccgtcaggggccttctgcttagtttgatgcctggcagttccctactctcgccttccgcttcctcgctcactgactcgctgcgctcggtcgttcggctgcggcgagcggtatcagctcactcaaaggcggtaatacggttatccacagaatcaggggataacgcaggaaagaacatgtgagcaaaaggccagcaaaaggccaggaaccgtaaaaaggccgcgttgctggcgtttttccataggctccgcccccctgacgagcatcacaaaaatcgacgctcaagtcagaggtggcgaaacccgacaggactataaagataccaggcgtttccccctggaagctccctcgtgcgctctcctgttccgaccctgccgcttaccggatacctgtccgcctttctcccttcgggaagcgtggcgctttctcatagctcacgctgtaggtatctcagttcggtgtaggtcgttcgctccaagctgggctgtgtgcacgaaccccccgttcagcccgaccgctgcgccttatccggtaactatcgtcttgagtccaacccggtaagacacgacttatcgccactggcagcagccactggtaacaggattagcagagcgaggtatgtaggcggtgctacagagttcttgaagtggtgggctaactacggctacactagaagaacagtatttggtatctgcgctctgctgaagccagttaccttcggaaaaagagttggtagctcttgatccggcaaacaaaccaccgctggtagcggtggtttttttgtttgcaagcagcagattacgcgcagaaaaaaaggatctcaagaagatcctttgatcttttctacggggtctgacgctcagtggaacgacgcgcgcgtaactcacgttaagggattttggtcatgagcttgcgccgtcccgtcaagtcagcgtaatgctctgcttt

SEQ ID NO: 12 - DNA, 8833 bp, Artificial Sequence
  Plasmid pGV1817N
tagaaaaactcatcgagcatcaaatgaaactgcaatttattcatatcaggattatcaataccatatttttgaaaaagccgtttctgtaatgaaggagaaaactcaccgaggcagttccataggatggcaagatcctggtatcggtctgcgattccgactcgtccaacatcaatacaacctattaatttcccctcgtcaaaaataaggttatcaagtgagaaatcaccatgagtgacgactgaatccggtgagaatggcaaaagtttatgcatttctttccagacttgttcaacaggccagccattacgctcgtcatcaaaatcactcgcatcaaccaaaccgttattcattcgtgattgcgcctgagcgaggcgaaatacgcgatcgctgttaaaaggacaattacaaacaggaatcgagtgcaaccggcgcaggaacactgccagcgcatcaacaatattttcacctgaatcaggatattcttctaatacctggaacgctgtttttccggggatcgcagtggtgagtaaccatgcatcatcaggagtacggataaaatgcttgatggtcggaagtggcataaattccgtcagccagtttagtctgaccatctcatctgtaacatcattggcaacgctacctttgccatgtttcagaaacaactctggcgcatcgggcttcccatacaagcgatagattgtcgcacctgattgcccgacattatcgcgagcccatttatacccatataaatcagcatccatgttggaatttaatcgcggcctcgacgtttcccgttgaatatggctcatattcttcctttttcaatattattgaagcatttatcagggttattgtctcatgagcggatacatatttgaatgtatttagaaaaataaacaaataggggtcagtgttacaaccaattaaccaattctgaacattatcgcgagcccatttatacctgaatatggctcataacaccccttgtttgcctggcggcagtagcgcggtggtcccacctgaccccatgccgaactcagaagtgaaacgccgtagcgccgatggtagtgtggggactccccatgcgagagtagggaactgccaggcatcaaataaaacgaaaggctcagtcgaaagactgggcctttcgcccgggctaattagggggtgtcgcccttattcgactctatagtgaagttcctattctctagaaagtataggaacttctgaagtggggctagccacgaaaaacaaactaacttatgcgcatcattagatgtaagaactactaaagagctactggagttggttgaggctttaggtccaaaaatttgtttgttgaagacacatgttgacatattaacagatttttctatggagggtaccgttaagcctctgaaagcgttaagcgcgaaatataactttcttttatttgaagaccgtaagtttgctgatattggaaatactgttaagttgcaatatagcgcaggagtttatagaattgccgaatgggctgacattacgaatgcccacggtgttgtaggtcctggcattgtgtctggattgaaacaagcggcagaggaagtgactaaggaaccaagaggtttactaatgctggcggaattatcttgcaaaggctctctagccaccggtgaatatacaaaaggtactgtggatattgcaaagtctgataaggacttcgtaatcggttttattgcacaaagagatatgggaggtcgtgacgagggctacgattggttaattatgacaccaggcgtaggattagatgacaaaggcgatgcgttaggccaacagtatcgtacagtcgatgatgtcgtaagtaccggttctgatatcattattgtcgggagaggtttatttgccaagggccgtgatgcgaaagtggagggggaaagatataggaaggcaggttgggaggcttacttgagaagatgtggtcagcagaattaagcggccgcataacaatactgacagtactaaataattgcctacttggcttcacatacgttgcatacgtcgatatagataataatgataatgacagcaggattatcgtaatacgtaatagttgaaaatctcaaaaatgtgtgggtcattacgtaaataatgataggaatgggattcttctatttttcctttttccattctagcagccgtcgggaaaacgtggcatcctctctttcgggctcaattggagtcacgctgccgtgagcatcctctctttccatatctaacaactgagcacgtaaccaatggaaaagcatgagcttagcgttgctccaaaaaagtattggatggttaataccatttgtctgttctcttctgactttgactcctcaaaaaaaaaaaatctacaatcaacagatcgcttcaattacgccctcacaaaaacttttttccttcttcttcgcccacgttaaattttatccctcatgttgtctaacggatttctgcacttgatttattataaaaagacaaagacataatacttctctatcaatttcagttattgttcttccttgcgttattcttctgttcttctttttcttttgtcatatataaccataaccaagtaatacatattcaaactcgagatgctttcactacgtcaatctataagatttttcaagccagccacaagaactttgtgtagctctagatatctgcttcagcaaaaacccgtggtgatggccaactattttaacacattaaatttgagacaacaattggctcaactgggtaagtgcagatttatgggaagggacgagtttgctgatggtgcttcttatctgcaaggaaagaaagtagtaattgttggctgcggtgctcagggtctaaaccaaggtttaaacatgagagattcaggtctggatatttcgtatgcattgaggaaagagtctattgcagaaaaggatgccgattggcgtaaagcgacggaaaatgggttcaaagttggtacttacgaagaactgatccctcaggcagatttagtgattaacctaacaccagataaggttcactcagacgtagtaagaacagttcaaccgctgatgaaggatggggcagctttaggttactctcatggctttaatatcgttgaagtgggcgagcagatcagaaaagatataacagtcgtaatggttgcaccaaagtgcccaggtacggaagtcagagaggagtacaagaggggttttggtgtacctacattgatcgccgtacatcctgaaaatgaccccaaaggtgaaggtatggcaattgcgaaggcatgggcagccgcaaccggaggtcatagagcgggtgtgttagagagttctttcgtagctgaggtcaagagtgacttaatgggtgaacaaaccattctgtgcggaatgttgcaggcagggtctttactatgctttgataaattggtcgaagagggtacagatcctgcctatgctgaaaagttgatacaatttggttgggagacaatcaccgaggcacttaaacaaggtggcataacattgatgatggatagactttcaaatccggccaagctaagagcctacgccttatctgagcaactaaaagagatcatggcaccattattccaaaagcacatggacgatattatctccggtgagttttcctcaggaatgatggcagattgggcaaacgatgataaaaagttattgacgtggagagaagaaaccggcaagacggcattcgagacagccccacaatacgaaggtaaaattggtgaacaagaatactttgataagggagtattgatgatagctatggtgaaggcaggggtagaacttgcattcgaaactatggttgactccggtatcattgaagaatctgcatactatgagtctttgcatgaattgcctttgatagcaaatactattgcaagaaaaagactttacgagatgaatgttgtcatatcagacactgcagaatatggtaattacttatttagctacgcatgtgtcccgttgttaaagcccttcatggccgagttacaacctggtgatttggggaaggctattccggaaggagcggttgacaatggccaactgagagacgtaaatgaagctattcgttcacatgctatagaacaggtgggtaaaaagctgagaggatatatgaccgatatgaaaagaattgcagtggcaggacaccaccaccaccaccactgacctaggatcttgtttaaagattacggatatttaacttacttagaataatgccatttttttgagttataataatcctacgttagtgtgagcgggatttaaactgtgaggaccttaatacattcagacacttctgcggtatcaccctacttattcccttcgagattatatctaggaacccatcaggttggtggaagattacccgttctaagacttttcagcttcctctattgatgttacacctggacaccccttttctggcatccagtttttaatcttcagtggcatgtgagattctccgaaattaattaaagcaatcacacaattctctcggataccacctcggttgaaactgacaggtggtttgttacgcatgctaatgcaaaggagcctatatacctttggctcggctgctgtaacagggaatataaagggcagcataatttaggagtttagtgaacttgcaacatttactattttcccttcttacgtaaatatttttctttttaattctaaatcaatctttttcaattttttgtttgtattcttttcttgcttaaatctataactacaaaaaacacatacataaactaaaagtcgacatgggcttgttaacgaaagttgctacatctagacaattctctacaacgagatgcgttgcaaagaagctcaacaagtactcgtatatcatcactgaacctaagggccaaggtgcgtcccaggccatgctttatgccaccggtttcaagaaggaagatttcaagaagcctcaagtcggggttggttcctgttggtggtccggtaacccatgtaacatgcatctattggacttgaataacagatgttctcaatccattgaaaaagcgggtttgaaagctatgcagttcaacaccatcggtgtttcagacggtatctctatgggtactaaaggtatgagatactcgttacaaagtagagaaatcattgcagactcctttgaaaccatcatgatggcacaacactacgatgctaacatcgccatcccatcatgtgacaaaaacatgcccggtgtcatgatggccatgggtagacataacagaccttccatcatggtatatggtggtactatcttgcccggtcatccaacatgtggttcttcgaagatctctaaaaacatcgatatcgtctctgcgttccaatcctacggtgaatatatttccaagcaattcactgaagaagaaagagaagatgttgtggaacatgcatgcccaggtcctggttcttgtggtggtatgtatactgccaacacaatggcttctgccgctgaagtgctaggtttgaccattccaaactcctcttccttcccagccgtttccaaggagaagttagctgagtgtgacaacattggtgaatacatcaagaagacaatggaattgggtattttacctcgtgatatcctcacaaaagaggcttttgaaaacgccattacttatgtcgttgcaaccggtgggtccactaatgctgttttgcatttggtggctgttgctcactctgcgggtgtcaagttgtcaccagatgatttccaaagaatcagtgatactacaccattgatcggtgacttcaaaccttctggtaaatacgtcatggccgatttgattaacgttggtggtacccaatctgtgattaagtatctatatgaaaacaacatgttgcacggtaacacaatgactgttaccggtgacactttggcagaacgtgcaaagaaagcaccaagcctacctgaaggacaagagattattaagccactctcccacccaatcaaggccaacggtcacttgcaaattctgtacggttcattggcaccaggtggagctgtgggtaaaattaccggtaaggaaggtacttacttcaagggtagagcacgtgtgttcgaagaggaaggtgcctttattgaagccttggaaagaggtgaaatcaagaagggtgaaaaaaccgttgttgttatcagatatgaaggtccaagaggtgcaccaggtatgcctgaaatgctaaagccttcctctgctctgatgggttacggtttgggtaaagatgttgcattgttgactgatggtagattctctggtggttctcacgggttcttaatcggccacattgttcccgaagccgctgaaggtggtcctatcgggttggtcagagacggcgatgagattatcattgatgctgataataacaagattgacctattagtctctgataaggaaatggctcaacgtaaacaaagttgggttgcacctccacctcgttacacaagaggtactctatccaagtatgctaagttggtttccaacgcttccaacggttgtgttttagatgcttgaggatccgcgatttaatctctaattattagttaaagttttataagcatttttatgtaacgaaaaataaattggttcatattattactgcactgtcacttaccatggaaagaccagacaagaagttgccgacagtctgttgaattggcctggttaggcttaagtctgggtccgcttctttacaaatttggagaatttctcttaaacgatatgtatattcttttcgttggaaaagatgtcttccaaaaaaaaaaccgatgaattagtggaaccaaggaaaaaaaaagaggtatccttgattaaggaacactgtttaaacagtgtggtttccaaaaccctgaaactgcattagtgtaatagaagactagacacctcgatacaaataatggttactcaattcaaaactgccagcgaattcgactctgcaattgctcaagacaagctagttgtcgtagatttctacgccacttggtgcggtccatgtaaaatgattgctccaatgattgaaaaattctctgaacaatacccacaagctgatttctataaattggatgtcgatgaattgggtgatgttgcacaaaagaatgaagtttccgctatgccaactttgcttctattcaagaacggtaaggaagttgcaaaggttgttggtgccaacccagcggctattaagcaagccattgctgctaatgcttaaactcacccaatgaccgatatattgtgtttctatactgtgtttgttatatatagtttacctttaagcttaaaatgaagtgaagttcctatactttctagagaataggaacttctatagtgagtcgaataagggcgacacaaaatttattctaaatgcataataaatactgataacatcttatagtttgtattatattttgtattatcgttgacatgtataattttgatatcaaaaactgattttccctttattattttcgagatttattttcttaattctctttaacaaactagaaatattgtatatacaaaaaatcataaataatagatgaatagtttaattataggtgttcatcaatcgaaaaagcaacgtatcttatttaaagtgcgttgcttttttctcatttataaggttaaataattctcatatatcaagcaaagtgacaggcgcccttaaatattctgacaaatgctctttccctaaactccccccataaaaaaacccgccgaagcgggtttttacgttatttgcggattaacgattactcgttatcagaaccgcccagggggcccgagcttaagactggccgtcgttttacaacacagaaagagtttgtagaaacgcaaaaaggccatccgtcaggggccttctgcttagtttgatgcctggcagttccctactctcgccttccgcttcctcgctcactgactcgctgcgctcggtcgttcggctgcggcgagcggtatcagctcactcaaaggcggtaatacggttatccacagaatcaggggataacgcaggaaagaacatgtgagcaaaaggccagcaaaaggccaggaaccgtaaaaaggccgcgttgctggcgtttttccataggctccgcccccctgacgagcatcacaaaaatcgacgctcaagtcagaggtggcgaaacccgacaggactataaagataccaggcgtttccccctggaagctccctcgtgcgctctcctgttccgaccctgccgcttaccggatacctgtccgcctttctcccttcgggaagcgtggcgctttctcatagctcacgctgtaggtatctcagttcggtgtaggtcgttcgctccaagctgggctgtgtgcacgaaccccccgttcagcccgaccgctgcgccttatccggtaactatcgtcttgagtccaacccggtaagacacgacttatcgccactggcagcagccactggtaacaggattagcagagcgaggtatgtaggcggtgctacagagttcttgaagtggtgggctaactacggctacactagaagaacagtatttggtatctgcgctctgctgaagccagttaccttcggaaaaagagttggtagctcttgatccggcaaacaaaccaccgctggtagcggtggtttttttgtttgcaagcagcagattacgcgcagaaaaaaaggatctcaagaagatcctttgatcttttctacggggtctgacgctcagtggaacgacgcgcgcgtaactcacgttaagggattttggtcatgagcttgcgccgtcccgtcaagtcagcgtaatgctctgcttt

SEQ ID NO: 13 - DNA, 8584 bp, Artificial Sequence
  Plasmid pGV1832N
tagaaaaactcatcgagcatcaaatgaaactgcaatttattcatatcaggattatcaataccatatttttgaaaaagccgtttctgtaatgaaggagaaaactcaccgaggcagttccataggatggcaagatcctggtatcggtctgcgattccgactcgtccaacatcaatacaacctattaatttcccctcgtcaaaaataaggttatcaagtgagaaatcaccatgagtgacgactgaatccggtgagaatggcaaaagtttatgcatttctttccagacttgttcaacaggccagccattacgctcgtcatcaaaatcactcgcatcaaccaaaccgttattcattcgtgattgcgcctgagcgaggcgaaatacgcgatcgctgttaaaaggacaattacaaacaggaatcgagtgcaaccggcgcaggaacactgccagcgcatcaacaatattttcacctgaatcaggatattcttctaatacctggaacgctgtttttccggggatcgcagtggtgagtaaccatgcatcatcaggagtacggataaaatgcttgatggtcggaagtggcataaattccgtcagccagtttagtctgaccatctcatctgtaacatcattggcaacgctacctttgccatgtttcagaaacaactctggcgcatcgggcttcccatacaagcgatagattgtcgcacctgattgcccgacattatcgcgagcccatttatacccatataaatcagcatccatgttggaatttaatcgcggcctcgacgtttcccgttgaatatggctcatattcttcctttttcaatattattgaagcatttatcagggttattgtctcatgagcggatacatatttgaatgtatttagaaaaataaacaaataggggtcagtgttacaaccaattaaccaattctgaacattatcgcgagcccatttatacctgaatatggctcataacaccccttgtttgcctggcggcagtagcgcggtggtcccacctgaccccatgccgaactcagaagtgaaacgccgtagcgccgatggtagtgtggggactccccatgcgagagtagggaactgccaggcatcaaataaaacgaaaggctcagtcgaaagactgggcctttcgcccgggctaattagggggtgtcgcccttattcgactctatagtgaagttcctattctctagaaagtataggaacttctgaagtggggctagccacgaaaaacaaactaacttatgcgcatcattagatgtaagaactactaaagagctactggagttggttgaggctttaggtccaaaaatttgtttgttgaagacacatgttgacatattaacagatttttctatggagggtaccgttaagcctctgaaagcgttaagcgcgaaatataactttcttttatttgaagaccgtaagtttgctgatattggaaatactgttaagttgcaatatagcgcaggagtttatagaattgccgaatgggctgacattacgaatgcccacggtgttgtaggtcctggcattgtgtctggattgaaacaagcggcagaggaagtgactaaggaaccaagaggtttactaatgctggcggaattatcttgcaaaggctctctagccaccggtgaatatacaaaaggtactgtggatattgcaaagtctgataaggacttcgtaatcggttttattgcacaaagagatatgggaggtcgtgacgagggctacgattggttaattatgacaccaggcgtaggattagatgacaaaggcgatgcgttaggccaacagtatcgtacagtcgatgatgtcgtaagtaccggttctgatatcattattgtcgggagaggtttatttgccaagggccgtgatgcgaaagtggagggggaaagatataggaaggcaggttgggaggcttacttgagaagatgtggtcagcagaattaagcggccgcataacaatactgacagtactaaataattgcctacttggcttcacatacgttgcatacgtcgatatagataataatgataatgacagcaggattatcgtaatacgtaatagttgaaaatctcaaaaatgtgtgggtcattacgtaaataatgataggaatgggattcttctatttttcctttttccattctagcagccgtcgggaaaacgtggcatcctctctttcgggctcaattggagtcacgctgccgtgagcatcctctctttccatatctaacaactgagcacgtaaccaatggaaaagcatgagcttagcgttgctccaaaaaagtattggatggttaataccatttgtctgttctcttctgactttgactcctcaaaaaaaaaaaatctacaatcaacagatcgcttcaattacgccctcacaaaaacttttttccttcttcttcgcccacgttaaattttatccctcatgttgtctaacggatttctgcacttgatttattataaaaagacaaagacataatacttctctatcaatttcagttattgttcttccttgcgttattcttctgttcttctttttcttttgtcatatataaccataaccaagtaatacatattcaaactcgagatgctttcactacgtcaatctataagatttttcaagccagccacaagaactttgtgtagctctagatatctgcttcagcaaaaacccgtggtgatggccaactattttaacacattaaatttgagacaacaattggctcaactgggtaagtgcagatttatgggaagggacgagtttgctgatggtgcttcttatctgcaaggaaagaaagtagtaattgttggctgcggtgctcagggtctaaaccaaggtttaaacatgagagattcaggtctggatatttcgtatgcattgaggaaagagtctattgcagaaaaggatgccgattggcgtaaagcgacggaaaatgggttcaaagttggtacttacgaagaactgatccctcaggcagatttagtgattaacctaacaccagataaggttcactcagacgtagtaagaacagttcaaccgctgatgaaggatggggcagctttaggttactctcatggctttaatatcgttgaagtgggcgagcagatcagaaaagatataacagtcgtaatggttgcaccaaagtgcccaggtacggaagtcagagaggagtacaagaggggttttggtgtacctacattgatcgccgtacatcctgaaaatgaccccaaaggtgaaggtatggcaattgcgaaggcatgggcagccgcaaccggaggtcatagagcgggtgtgttagagagttctttcgtagctgaggtcaagagtgacttaatgggtgaacaaaccattctgtgcggaatgttgcaggcagggtctttactatgctttgataaattggtcgaagagggtacagatcctgcctatgctgaaaagttgatacaatttggttgggagacaatcaccgaggcacttaaacaaggtggcataacattgatgatggatagactttcaaatccggccaagctaagagcctacgccttatctgagcaactaaaagagatcatggcaccattattccaaaagcacatggacgatattatctccggtgagttttcctcaggaatgatggcagattgggcaaacgatgataaaaagttattgacgtggagagaagaaaccggcaagacggcattcgagacagccccacaatacgaaggtaaaattggtgaacaagaatactttgataagggagtattgatgatagctatggtgaaggcaggggtagaacttgcattcgaaactatggttgactccggtatcattgaagaatctgcatactatgagtctttgcatgaattgcctttgatagcaaatactattgcaagaaaaagactttacgagatgaatgttgtcatatcagacactgcagaatatggtaattacttatttagctacgcatgtgtcccgttgttaaagcccttcatggccgagttacaacctggtgatttggggaaggctattccggaaggagcggttgacaatggccaactgagagacgtaaatgaagctattcgttcacatgctatagaacaggtgggtaaaaagctgagaggatatatgaccgatatgaaaagaattgcagtggcaggacaccaccaccaccaccactgacctaggatcttgtttaaagattacggatatttaacttacttagaataatgccatttttttgagttataataatcctacgttagtgtgagcgggatttaaactgtgaggaccttaatacattcagacacttctgcggtatcaccctacttattcccttcgagattatatctaggaacccatcaggttggtggaagattacccgttctaagacttttcagcttcctctattgatgttacacctggacaccccttttctggcatccagtttttaatcttcagtggcatgtgagattctccgaaattaattaaagcaatcacacaattctctcggataccacctcggttgaaactgacaggtggtttgttacgcatgctaatgcaaaggagcctatatacctttggctcggctgctgtaacagggaatataaagggcagcataatttaggagtttagtgaacttgcaacatttactattttcccttcttacgtaaatatttttctttttaattctaaatcaatctttttcaattttttgtttgtattcttttcttgcttaaatctataactacaaaaaacacatacataaactaaaagtcgacatgggcttgttaacgaaagttgctacatctagacaattctctacaacgagatgcgttgcaaagaagctcaacaagtactcgtatatcatcactgaacctaagggccaaggtgcgtcccaggccatgctttatgccaccggtttcaagaaggaagatttcaagaagcctcaagtcggggttggttcctgttggtggtccggtaacccatgtaacatgcatctattggacttgaataacagatgttctcaatccattgaaaaagcgggtttgaaagctatgcagttcaacaccatcggtgtttcagacggtatctctatgggtactaaaggtatgagatactcgttacaaagtagagaaatcattgcagactcctttgaaaccatcatgatggcacaacactacgatgctaacatcgccatcccatcatgtgacaaaaacatgcccggtgtcatgatggccatgggtagacataacagaccttccatcatggtatatggtggtactatcttgcccggtcatccaacatgtggttcttcgaagatctctaaaaacatcgatatcgtctctgcgttccaatcctacggtgaatatatttccaagcaattcactgaagaagaaagagaagatgttgtggaacatgcatgcccaggtcctggttcttgtggtggtatgtatactgccaacacaatggcttctgccgctgaagtgctaggtttgaccattccaaactcctcttccttcccagccgtttccaaggagaagttagctgagtgtgacaacattggtgaatacatcaagaagacaatggaattgggtattttacctcgtgatatcctcacaaaagaggcttttgaaaacgccattacttatgtcgttgcaaccggtgggtccactaatgctgttttgcatttggtggctgttgctcactctgcgggtgtcaagttgtcaccagatgatttccaaagaatcagtgatactacaccattgatcggtgacttcaaaccttctggtaaatacgtcatggccgatttgattaacgttggtggtacccaatctgtgattaagtatctatatgaaaacaacatgttgcacggtaacacaatgactgttaccggtgacactttggcagaacgtgcaaagaaagcaccaagcctacctgaaggacaagagattattaagccactctcccacccaatcaaggccaacggtcacttgcaaattctgtacggttcattggcaccaggtggagctgtgggtaaaattaccggtaaggaaggtacttacttcaagggtagagcacgtgtgttcgaagaggaaggtgcctttattgaagccttggaaagaggtgaaatcaagaagggtgaaaaaaccgttgttgttatcagatatgaaggtccaagaggtgcaccaggtatgcctgaaatgctaaagccttcctctgctctgatgggttacggtttgggtaaagatgttgcattgttgactgatggtagattctctggtggttctcacgggttcttaatcggccacattgttcccgaagccgctgaaggtggtcctatcgggttggtcagagacggcgatgagattatcattgatgctgataataacaagattgacctattagtctctgataaggaaatggctcaacgtaaacaaagttgggttgcacctccacctcgttacacaagaggtactctatccaagtatgctaagttggtttccaacgcttccaacggttgtgttttagatgcttgaggatccaatcgatccaaagaagagagttatcttgttcattggtgacggttctttgcaattgactgtccaagaaatctccaccatgatcagatggggtttgaagccatacttgttcgtcttgaacaacgatggttacaccattgaaagattgattcacggtgaaaccgctcaatacaactgtatccaatcttggaagcacttggacctattgccaaccttcggtgccaaggactacgaagccgtcagagtcgccaccactggtgaatggaacaagttgaccactgacaagaagttccaagaaaactctaagatcagattgatcgaagtcatgttgccagtcatggatgctccatccaacttggtcaagcaagctcaattgactgcttccatcaacgccaagcaagaatagagagggagaggataaagagataaattacgattttggattttaatgattttataaacaacaacaaccaaccagccttttactttatttggcatatacacaagcttaaaatgaagtgaagttcctatactttctagagaataggaacttctatagtgagtcgaataagggcgacacaaaatttattctaaatgcataataaatactgataacatcttatagtttgtattatattttgtattatcgttgacatgtataattttgatatcaaaaactgattttccctttattattttcgagatttattttcttaattctctttaacaaactagaaatattgtatatacaaaaaatcataaataatagatgaatagtttaattataggtgttcatcaatcgaaaaagcaacgtatcttatttaaagtgcgttgcttttttctcatttataaggttaaataattctcatatatcaagcaaagtgacaggcgcccttaaatattctgacaaatgctctttccctaaactccccccataaaaaaacccgccgaagcgggtttttacgttatttgcggattaacgattactcgttatcagaaccgcccagggggcccgagcttaagactggccgtcgttttacaacacagaaagagtttgtagaaacgcaaaaaggccatccgtcaggggccttctgcttagtttgatgcctggcagttccctactctcgccttccgcttcctcgctcactgactcgctgcgctcggtcgttcggctgcggcgagcggtatcagctcactcaaaggcggtaatacggttatccacagaatcaggggataacgcaggaaagaacatgtgagcaaaaggccagcaaaaggccaggaaccgtaaaaaggccgcgttgctggcgtttttccataggctccgcccccctgacgagcatcacaaaaatcgacgctcaagtcagaggtggcgaaacccgacaggactataaagataccaggcgtttccccctggaagctccctcgtgcgctctcctgttccgaccctgccgcttaccggatacctgtccgcctttctcccttcgggaagcgtggcgctttctcatagctcacgctgtaggtatctcagttcggtgtaggtcgttcgctccaagctgggctgtgtgcacgaaccccccgttcagcccgaccgctgcgccttatccggtaactatcgtcttgagtccaacccggtaagacacgacttatcgccactggcagcagccactggtaacaggattagcagagcgaggtatgtaggcggtgctacagagttcttgaagtggtgggctaactacggctacactagaagaacagtatttggtatctgcgctctgctgaagccagttaccttcggaaaaagagttggtagctcttgatccggcaaacaaaccaccgctggtagcggtggtttttttgtttgcaagcagcagattacgcgcagaaaaaaaggatctcaagaagatcctttgatcttttctacggggtctgacgctcagtggaacgacgcgcgcgtaactcacgttaagggattttggtcatgagcttgcgccgtcccgtcaagtcagcgtaatgctctgcttt

SEQ ID NO: 14 - DNA, 10529 bp, Artificial Sequence
  Plasmid pGV1834N
tagaaaaactcatcgagcatcaaatgaaactgcaatttattcatatcaggattatcaataccatatttttgaaaaagccgtttctgtaatgaaggagaaaactcaccgaggcagttccataggatggcaagatcctggtatcggtctgcgattccgactcgtccaacatcaatacaacctattaatttcccctcgtcaaaaataaggttatcaagtgagaaatcaccatgagtgacgactgaatccggtgagaatggcaaaagtttatgcatttctttccagacttgttcaacaggccagccattacgctcgtcatcaaaatcactcgcatcaaccaaaccgttattcattcgtgattgcgcctgagcgaggcgaaatacgcgatcgctgttaaaaggacaattacaaacaggaatcgagtgcaaccggcgcaggaacactgccagcgcatcaacaatattttcacctgaatcaggatattcttctaatacctggaacgctgtttttccggggatcgcagtggtgagtaaccatgcatcatcaggagtacggataaaatgcttgatggtcggaagtggcataaattccgtcagccagtttagtctgaccatctcatctgtaacatcattggcaacgctacctttgccatgtttcagaaacaactctggcgcatcgggcttcccatacaagcgatagattgtcgcacctgattgcccgacattatcgcgagcccatttatacccatataaatcagcatccatgttggaatttaatcgcggcctcgacgtttcccgttgaatatggctcatattcttcctttttcaatattattgaagcatttatcagggttattgtctcatgagcggatacatatttgaatgtatttagaaaaataaacaaataggggtcagtgttacaaccaattaaccaattctgaacattatcgcgagcccatttatacctgaatatggctcataacaccccttgtttgcctggcggcagtagcgcggtggtcccacctgaccccatgccgaactcagaagtgaaacgccgtagcgccgatggtagtgtggggactccccatgcgagagtagggaactgccaggcatcaaataaaacgaaaggctcagtcgaaagactgggcctttcgcccgggctaattagggggtgtcgcccttattcgactctatagtgaagttcctattctctagaaagtataggaacttctgaagtggggagatctcaccagtaaaacatacgcatacacatacacacatagagcaagcaagcaggctagcaaccaggaaaggctgccagtgactgctactgggtgtctaagaaccgtagggcggattattgttgcggtggttggttgcgggtggttatgcgatggtacggtgcagaatcgtacggtgttggttatggaattagtatgggtatgtgatatgtggtaatatgtgatattgggttattgtgatttggaatactgaatatcgaatatgggatatggaatatggccatggcatggtatggtatgggatgggagtattctattttattttattttattctggttcctgcgtttagggtagggtaggaagaaggtgagtgcttttgtatataagtggagtgtctggatcagttttgtggattgtgaatgttagtttcccctttaatgtatatttgtattatttgcttttgagtactcaataaccaagcacaactactagttttaaaggatccatcctcttaaacagtacaaatcgcaaagaaaagctccacacccaaaccaaataattgcagtcgagatgctttcactacgtcaatctataagatttttcaagccagccacaagaactttgtgtagctctagatatctgcttatgttgactaaagctacaaaagagcagaaatcattggtgaaaaataggggtgcagaacttgttgtggactgtttggtagaacagggcgtaacacatgtttttggtatcccaggtgcaaaaatcgacgccgtgtttgatgcattacaagacaagggtccagaaattattgttgctagacatgagcaaaatgccgcatttatggcgcaagctgtaggtaggcttacaggtaaacctggtgttgtcctagttacgtctggcccaggagcctccaatttagcaactggtctattgacagctaatactgagggagatcctgtagttgcgttagccggtaatgtaattagagctgataggcttaagagaactcaccagtctctagacaacgctgctttattccaaccgatcaccaagtactcagtagaggtacaagacgtaaagaatatacctgaagctgtgacaaacgcatttcgtatagcttctgctggtcaggctggtgccgcgtttgtttcttttcctcaagacgttgtcaatgaagtgaccaatactaaaaacgttagagcggttgcagcccctaaactaggtccagccgcagacgacgcaattagcgctgcaattgctaaaattcagacggcgaaactaccagtagtccttgtcggtatgaagggcggaagaccagaagcaataaaagctgttcgtaagttattgaagaaagtccaattacctttcgttgagacttaccaagcagcaggtactttatctagagatttagaggatcagtattttggaaggataggtctatttagaaaccaaccaggagatttactattagaacaagctgatgttgtacttactatcggttatgatcctatagagtatgacccaaagttttggaacataaatggggatagaacaattatacatctagacgagataatcgccgacatcgatcacgcttatcaaccagatttagaactaatcggagatatcccgtcaacaatcaatcatattgaacatgatgctgtaaaggttgagttcgctgaacgtgagcagaaaatcttatctgatctaaagcaatatatgcatgagggtgaacaagttccagcagactggaaatctgaccgtgcacatcctttggaaatcgttaaggaactaagaaatgcggtcgatgatcatgtgactgttacatgtgatatcggttcacatgcaatttggatgtcacgttattttaggagctacgaaccattaactttaatgatatctaacgggatgcaaactctgggggttgcacttccttgggctattggcgctagtttagttaagcccggtgagaaggtggtatcggtatcaggtgatggtggctttctgttttcggctatggaattagaaactgcagtccgtttaaaagctcccattgtgcatattgtctggaatgattctacttacgacatggttgcttttcaacagttgaagaaatacaatagaacttcggctgtagactttggtaacatcgatattgtgaaatatgctgagtcttttggcgcaacaggcctgagggtggaaagtccagatcagttagctgatgtgttgagacaagggatgaatgccgagggaccggtaatcatagatgtgccagttgactactcagacaatattaatttggcttctgataaacttcctaaagagtttggcgagctaatgaagaccaaagccttataaggatccataaaaaacacgctttttcagttcgagtttatcattatcaatactgccatttcaaagaatacgtaaataattaatagtagtgattttcctaactttatttagtcaaaaaattagccttttaattctgctgtaacccgtacatgcccaaaatagggggcgggttacacagaatatataacatcgtaggtgtctgggtgaacagtttattcctggcatccactaaatataatggagcccgctttttaagctggcatccagaaaaaaaaagaatcccagcaccaaaatattgttttcttcaccaaccatcagttcataggtccattctcttagcgcaactacagagaacaggggcacaaacaggcaaaaaacgggcacaacctcaatggagtgatgcaacctgcctggagtaaatgatgacacaaggcaattgacccacgcatgtatctatctcattttcttacaccttctattaccttctgctctctctgatttggaaaaagctgaaaaaaaaggttgaaaccagttccctgaaattattcccctacttgactaataagtatataaagacggtaggtattgattgtaattctgtaaatctatttcttaaacttcttaaattctacttttatagttagtcttttttttagttttaaaacaccaagaacttagtttcgaataaacacacataaacaaacaaaaagcttatgtatactgttggagattatttgttagatagattgcatgaactaggcattgaagaaattttcggagttcccggggattacaatctgcaatttctagaccagattatttcacataaagacatgaaatgggtcggaaatgcaaatgagttaaatgcatcttacatggccgatggttatgccagaaccaaaaaggcggctgctttcttgactaccttcggggtgggtgaattatcggcagttaatggcttggctggatcatacgcagaaaacttgcctgtcgttgaaatcgttggctcgccaacatcaaaagttcaaaatgaaggaaaattcgtccaccacactttggcagatggtgacttcaagcacttcatgaaaatgcatgaacctgtaacggctgccagaactctactaactgctgagaatgcaactgtagagattgatcgtgtcttgagcgctcttttaaaggaaagaaagccagtctatattaacctgccagtagacgtcgcagcggccaaagcagagaagcctagcttaccacttaaaaaggaaaatagtacctcaaacacttcagatcaagagattcttaacaagatccaggaatctttgaaaaacgctaaaaagcccattgttataactggccatgagatcatatcatttggtttggagaaaacagtgacccagttcattagtaagacgaaactgccaataaccactctaaatttcggtaagtcctccgttgatgaagcgttgcctagcttcttgggtatttacaacggcaccttgtcagaacccaatctgaaagaatttgttgaatctgcagactttatattgatgttgggagtaaagttgactgacagctctactggtgcttttacacaccatctgaatgaaaacaagatgatatctcttaatatcgatgaaggtaagatattcaatgaaagaatacagaacttcgacttcgagagtctaatttcttccttactggacttaagtgaaatcgagtataaaggtaagtacattgacaaaaagcaggaagattttgttccgagcaacgcgctacttagtcaagatagattatggcaagctgttgaaaatctgacacaatccaatgagacaattgttgccgaacaaggtacctccttttttggcgcttcttccatcttcctaaagtccaagtctcatttcatagggcagccattgtggggtagcatcggttacacctttcctgctgctctagggtcccaaattgctgataaagaaagtagacatttgttgtttataggagacggatctttacaattgacagttcaagagttaggtttagccatcagagagaagattaatcctatctgcttcataataaacaacgatggctatacagttgagagggaaattcatggacctaatcaatcttataatgatataccaatgtggaattatagcaagttacctgaatcttttggggctaccgaggatcgtgttgtttctaagattgtaagaaccgaaaatgaatttgtttctgttatgaaggaagcacaagcggaccctaacaggatgtactggattgagttaattcttgctaaggagggtgcgccaaaggttctaaagaagatgggtaagttgttcgccgaacaaaacaaatccgtgacacatggttataatgtgcagcgatacaatcagttacgtaaaaattttggattttatagagcatattcttcactaagaggttgtaagagcgttttcagacgtatataggctaggtcatgtaattagttatgtcacgcttacattcacgccctccccccacatccgctctaaccgaaaaggaaggagttagacaacctgaagtctaggtccctatttatttttttatagttatgttagtattaagaacgttatttatatttcaaatttttcttttttttctgtacagacgcgtgtacgcatgtaacattatactgaaaaccttgcttgagaaggttttgggacgctcgaaggctttaatttgcgggtgtacaatatggacttcctcttttctggcaaccaaacccatacatcgggattcctataataccttcgttggtctccctaacatgtaggtggcggaggggagatatacaatagaacagataccagacaagacataatgggctaaacaagactacaccaattacactgcctcattgatggtggtacataacgaactaatactgtagccctagacttgatagccatcatcatatcgaagtttcactaccctttttccatttgccatctattgaagtaataataggcgcatgcaacttcttttctttttttttcttttctctctcccccgttgttgtctcaccatatccgcaatgacaaaaaaatgatggaagacactaaaggaaaaaattaacgacaaagacagcaccaacagatgtcgttgttccagagctgatgaggggtatctcgaagcacacgaaactttttccttccttcattcacgcacactactctctaatgagcaacggtatacggccttccttccagttacttgaatttgaaataaaaaaaagtttgctgtcttgctatcaagtataaatagacctgcaattattaatcttttgtttcctcgtcattgttctcgttccctttcttccttgtttctttttctgcacaatatttcaagctataccaagcatacaatcaactatctcatatacacatatgtcgtttactttgaccaacaagaacgtgattttcgttgccggtctgggaggcattggtctggacaccagcaaggagctgctcaagcgcgatctgaagaacctggtgatcctcgaccgcattgagaacccggctgccattgccgagctgaaggcaatcaatccaaaggtgaccgtcaccttctacccctatgatgtgaccgtgcccattgccgagaccaccaagctgctgaagaccatcttcgcccagctgaagaccgtcgatgtcctgatcaacggagctggtatcctggacgatcaccagatcgagcgcaccattgccgtcaactacactggcctggtcaacaccacgacggccattctggacttctgggacaagcgcaagggcggtcccggtggtatcatctgcaacattggatccgtcactggattcaatgccatctaccaggtgcccgtctactccggcaccaaggccgccgtggtcaacttcaccagctccctggcgaaactggcccccattaccggcgtgacggcttacactgtgaaccccggcatcacccgcaccaccctggtgcacacgttcaactcctggttggatgttgagcctcaggttgccgagaagctcctggctcatcccacccagccctcgttggcctgcgccgagaacttcgtcaaggctatcgagctgaaccagaacggagccatctggaaactggacttgggcaccctggaggccatccagtggaccaagcactgggactccggcatctaagcggccgcataacaatactgacagtactaaataattgcctacttggcttcacatacgttgcatacgtcgatatagataataatgataatgacagcaggattatcgtaatacgtaatagttgaaaatctcaaaaatgtgtgggtcattacgtaaataatgataggaatgggattcttctatttttcctttttccattctagcagccgtcgggaaaacgtggcatcctctctttcgggctcaattggagtcacgctgccgtgagcatcctctctttccatatctaacaactgagcacgtaaccaatggaaaagcatgagcttagcgttgctccaaaaaagtattggatggttaataccatttgtctgttctcttctgactttgactcctcaaaaaaaaaaaatctacaatcaacagatcgcttcaattacgccctcacaaaaacttttttccttcttcttcgcccacgttaaattttatccctcatgttgtctaacggatttctgcacttgatttattataaaaagacaaagacataatacttctctatcaatttcagttattgttcttccttgcgttattcttctgttcttctttttcttttgtcatatataaccataaccaagtaatacatattcaaactcgagatgtccaaagctacttataaagaaagggctgcaacccatccatccccagtggcagctaaactgtttaacataatgcacgaaaaacaaactaacttatgcgcatcattagatgtaagaactactaaagagctactggagttggttgaggctttaggtccaaaaatttgtttgttgaagacacatgttgacatattaacagatttttctatggagggtaccgttaagcctctgaaagcgttaagcgcgaaatataactttcttttatttgaagaccgtaagtttgctgatattggaaatactgttaagttgcaatatagcgcaggagtttatagaattgccgaatgggctgacattacgaatgcccacggtgttgtaggtcctggcattgtgtctggattgaaacaagcggcagaggaagtgactaaggaaccaagaggtttactaatgctggcggaattatcttgcaaaggctctctagccaccggtgaatatacaaaaggtactgtggatattgcaaagtctgataaggacttcgtaatcggttttattgcacaaagagatatgggaggtcgtgagaattcaaaatgaagtgaagttcctatactttctagagaataggaacttctatagtgagtcgaataagggcgacacaaaatttattctaaatgcataataaatactgataacatcttatagtttgtattatattttgtattatcgttgacatgtataattttgatatcaaaaactgattttccctttattattttcgagatttattttcttaattctctttaacaaactagaaatattgtatatacaaaaaatcataaataatagatgaatagtttaattataggtgttcatcaatcgaaaaagcaacgtatcttatttaaagtgcgttgcttttttctcatttataaggttaaataattctcatatatcaagcaaagtgacaggcgcccttaaatattctgacaaatgctctttccctaaactccccccataaaaaaacccgccgaagcgggtttttacgttatttgcggattaacgattactcgttatcagaaccgcccagggggcccgagcttaagactggccgtcgttttacaacacagaaagagtttgtagaaacgcaaaaaggccatccgtcaggggccttctgcttagtttgatgcctggcagttccctactctcgccttccgcttcctcgctcactgactcgctgcgctcggtcgttcggctgcggcgagcggtatcagctcactcaaaggcggtaatacggttatccacagaatcaggggataacgcaggaaagaacatgtgagcaaaaggccagcaaaaggccaggaaccgtaaaaaggccgcgttgctggcgtttttccataggctccgcccccctgacgagcatcacaaaaatcgacgctcaagtcagaggtggcgaaacccgacaggactataaagataccaggcgtttccccctggaagctccctcgtgcgctctcctgttccgaccctgccgcttaccggatacctgtccgcctttctcccttcgggaagcgtggcgctttctcatagctcacgctgtaggtatctcagttcggtgtaggtcgttcgctccaagctgggctgtgtgcacgaaccccccgttcagcccgaccgctgcgccttatccggtaactatcgtcttgagtccaacccggtaagacacgacttatcgccactggcagcagccactggtaacaggattagcagagcgaggtatgtaggcggtgctacagagttcttgaagtggtgggctaactacggctacactagaagaacagtatttggtatctgcgctctgctgaagccagttaccttcggaaaaagagttggtagctcttgatccggcaaacaaaccaccgctggtagcggtggtttttttgtttgcaagcagcagattacgcgcagaaaaaaaggatctcaagaagatcctttgatcttttctacggggtctgacgctcagtggaacgacgcgcgcgtaactcacgttaagggattttggtcatgagcttgcgccgtcccgtcaagtcagcgtaatgctctgcttt

SEQ ID NO: 15 - DNA, 10714 bp, Artificial Sequence
  Plasmid pGV7001N
tagaaaaactcatcgagcatcaaatgaaactgcaatttattcatatcaggattatcaataccatatttttgaaaaagccgtttctgtaatgaaggagaaaactcaccgaggcagttccataggatggcaagatcctggtatcggtctgcgattccgactcgtccaacatcaatacaacctattaatttcccctcgtcaaaaataaggttatcaagtgagaaatcaccatgagtgacgactgaatccggtgagaatggcaaaagtttatgcatttctttccagacttgttcaacaggccagccattacgctcgtcatcaaaatcactcgcatcaaccaaaccgttattcattcgtgattgcgcctgagcgaggcgaaatacgcgatcgctgttaaaaggacaattacaaacaggaatcgagtgcaaccggcgcaggaacactgccagcgcatcaacaatattttcacctgaatcaggatattcttctaatacctggaacgctgtttttccggggatcgcagtggtgagtaaccatgcatcatcaggagtacggataaaatgcttgatggtcggaagtggcataaattccgtcagccagtttagtctgaccatctcatctgtaacatcattggcaacgctacctttgccatgtttcagaaacaactctggcgcatcgggcttcccatacaagcgatagattgtcgcacctgattgcccgacattatcgcgagcccatttatacccatataaatcagcatccatgttggaatttaatcgcggcctcgacgtttcccgttgaatatggctcatattcttcctttttcaatattattgaagcatttatcagggttattgtctcatgagcggatacatatttgaatgtatttagaaaaataaacaaataggggtcagtgttacaaccaattaaccaattctgaacattatcgcgagcccatttatacctgaatatggctcataacaccccttgtttgcctggcggcagtagcgcggtggtcccacctgaccccatgccgaactcagaagtgaaacgccgtagcgccgatggtagtgtggggactccccatgcgagagtagggaactgccaggcatcaaataaaacgaaaggctcagtcgaaagactgggcctttcgcccgggctaattagggggtgtcgcccttattcgactctatagtgaagttcctattctctagaaagtataggaacttctgaagtggggaagcaaggcagaaactaacttcttcttcatgtaataaacacaccccgcgtttatttacctatctctaaacttcaacaccttatatcataactaatatttcttgagataagcacactgcacccataccttccttaaaaacgtagcttccagtttttggtggttccggcttccttcccgattccgcccgctaaacgcatatttttgttgcctggtggcatttgcaaaatgcataacctatgcatttaaaagattatgtatgctcttctgacttttcgtgtgatgaggctcgtggaaaaaatgaataatttatgaatttgagaacaattttgtgttgttacggtattttactatggaataatcaatcaattgaggattttatgcaaatatcgtttgaatatttttccgaccctttgagtacttttcttcataattgcataatattgtccgctgcccctttttctgttagacggtgtcttgatctacttgctatcgttcaacaccaccttattttctaactattttttttttagctcatttgaatcagcttatggtgatggcacatttttgcataaacctagctgtcctcgttgaacataggaaaaaaaaatatataaacaaggctctttcactctccttgcaatcagatttgggtttgttccctttattttcatatttcttgtcatattcctttctcaattattattttctactcataacctcacgcaaaataacacagtcaaatcaatcaaagtcgagatgctttcactacgtcaatctataagatttttcaagccagccacaagaactttgtgtagctctagatatctgcttatgttgactaaagctacaaaagagcagaaatcattggtgaaaaataggggtgcagaacttgttgtggactgtttggtagaacagggcgtaacacatgtttttggtatcccaggtgcaaaaatcgacgccgtgtttgatgcattacaagacaagggtccagaaattattgttgctagacatgagcaaaatgccgcatttatggcgcaagctgtaggtaggcttacaggtaaacctggtgttgtcctagttacgtctggcccaggagcctccaatttagcaactggtctattgacagctaatactgagggagatcctgtagttgcgttagccggtaatgtaattagagctgataggcttaagagaactcaccagtctctagacaacgctgctttattccaaccgatcaccaagtactcagtagaggtacaagacgtaaagaatatacctgaagctgtgacaaacgcatttcgtatagcttctgctggtcaggctggtgccgcgtttgtttcttttcctcaagacgttgtcaatgaagtgaccaatactaaaaacgttagagcggttgcagcccctaaactaggtccagccgcagacgacgcaattagcgctgcaattgctaaaattcagacggcgaaactaccagtagtccttgtcggtatgaagggcggaagaccagaagcaataaaagctgttcgtaagttattgaagaaagtccaattacctttcgttgagacttaccaagcagcaggtactttatctagagatttagaggatcagtattttggaaggataggtctatttagaaaccaaccaggagatttactattagaacaagctgatgttgtacttactatcggttatgatcctatagagtatgacccaaagttttggaacataaatggggatagaacaattatacatctagacgagataatcgccgacatcgatcacgcttatcaaccagatttagaactaatcggagatatcccgtcaacaatcaatcatattgaacatgatgctgtaaaggttgagttcgctgaacgtgagcagaaaatcttatctgatctaaagcaatatatgcatgagggtgaacaagttccagcagactggaaatctgaccgtgcacatcctttggaaatcgttaaggaactaagaaatgcggtcgatgatcatgtgactgttacatgtgatatcggttcacatgcaatttggatgtcacgttattttaggagctacgaaccattaactttaatgatatctaacgggatgcaaactctgggggttgcacttccttgggctattggcgctagtttagttaagcccggtgagaaggtggtatcggtatcaggtgatggtggctttctgttttcggctatggaattagaaactgcagtccgtttaaaagctcccattgtgcatattgtctggaatgattctacttacgacatggttgcttttcaacagttgaagaaatacaatagaacttcggctgtagactttggtaacatcgatattgtgaaatatgctgagtcttttggcgcaacaggcctgagggtggaaagtccagatcagttagctgatgtgttgagacaagggatgaatgccgagggaccggtaatcatagatgtgccagttgactactcagacaatattaatttggcttctgataaacttcctaaagagtttggcgagctaatgaagaccaaagccttataaggatccataaaaaacacgctttttcagttcgagtttatcattatcaatactgccatttcaaagaatacgtaaataattaatagtagtgattttcctaactttatttagtcaaaaaattagccttttaattctgctgtaacccgtacatgcccaaaatagggggcgggttacacagaatatataacatcgtaggtgtctgggtgaacagtttattcctggcatccactaaatataatggagcccgctttttaagctggcatccagaaaaaaaaagaatcccagcaccaaaatattgttttcttcaccaaccatcagttcataggtccattctcttagcgcaactacagagaacaggggcacaaacaggcaaaaaacgggcacaacctcaatggagtgatgcaacctgcctggagtaaatgatgacacaaggcaattgacccacgcatgtatctatctcattttcttacaccttctattaccttctgctctctctgatttggaaaaagctgaaaaaaaaggttgaaaccagttccctgaaattattcccctacttgactaataagtatataaagacggtaggtattgattgtaattctgtaaatctatttcttaaacttcttaaattctacttttatagttagtcttttttttagttttaaaacaccaagaacttagtttcgaataaacacacataaacaaacaaaaagcttatgtatactgttggagattatttgttagatagattgcatgaactaggcattgaagaaattttcggagttcccggggattacaatctgcaatttctagaccagattatttcacataaagacatgaaatgggtcggaaatgcaaatgagttaaatgcatcttacatggccgatggttatgccagaaccaaaaaggcggctgctttcttgactaccttcggggtgggtgaattatcggcagttaatggcttggctggatcatacgcagaaaacttgcctgtcgttgaaatcgttggctcgccaacatcaaaagttcaaaatgaaggaaaattcgtccaccacactttggcagatggtgacttcaagcacttcatgaaaatgcatgaacctgtaacggctgccagaactctactaactgctgagaatgcaactgtagagattgatcgtgtcttgagcgctcttttaaaggaaagaaagccagtctatattaacctgccagtagacgtcgcagcggccaaagcagagaagcctagcttaccacttaaaaaggaaaatagtacctcaaacacttcagatcaagagattcttaacaagatccaggaatctttgaaaaacgctaaaaagcccattgttataactggccatgagatcatatcatttggtttggagaaaacagtgacccagttcattagtaagacgaaactgccaataaccactctaaatttcggtaagtcctccgttgatgaagcgttgcctagcttcttgggtatttacaacggcaccttgtcagaacccaatctgaaagaatttgttgaatctgcagactttatattgatgttgggagtaaagttgactgacagctctactggtgcttttacacaccatctgaatgaaaacaagatgatatctcttaatatcgatgaaggtaagatattcaatgaaagaatacagaacttcgacttcgagagtctaatttcttccttactggacttaagtgaaatcgagtataaaggtaagtacattgacaaaaagcaggaagattttgttccgagcaacgcgctacttagtcaagatagattatggcaagctgttgaaaatctgacacaatccaatgagacaattgttgccgaacaaggtacctccttttttggcgcttcttccatcttcctaaagtccaagtctcatttcatagggcagccattgtggggtagcatcggttacacctttcctgctgctctagggtcccaaattgctgataaagaaagtagacatttgttgtttataggagacggatctttacaattgacagttcaagagttaggtttagccatcagagagaagattaatcctatctgcttcataataaacaacgatggctatacagttgagagggaaattcatggacctaatcaatcttataatgatataccaatgtggaattatagcaagttacctgaatcttttggggctaccgaggatcgtgttgtttctaagattgtaagaaccgaaaatgaatttgtttctgttatgaaggaagcacaagcggaccctaacaggatgtactggattgagttaattcttgctaaggagggtgcgccaaaggttctaaagaagatgggtaagttgttcgccgaacaaaacaaatccgtgacacatggttataatgtgcagcgatacaatcagttacgtaaaaattttggattttatagagcatattcttcactaagaggttgtaagagcgttttcagacgtatataggctaggtcatgtaattagttatgtcacgcttacattcacgccctccccccacatccgctctaaccgaaaaggaaggagttagacaacctgaagtctaggtccctatttatttttttatagttatgttagtattaagaacgttatttatatttcaaatttttcttttttttctgtacagacgcgtgtacgcatgtaacattatactgaaaaccttgcttgagaaggttttgggacgctcgaaggctttaatttgcgggtgtacaatatggacttcctcttttctggcaaccaaacccatacatcgggattcctataataccttcgttggtctccctaacatgtaggtggcggaggggagatatacaatagaacagataccagacaagacataatgggctaaacaagactacaccaattacactgcctcattgatggtggtacataacgaactaatactgtagccctagacttgatagccatcatcatatcgaagtttcactaccctttttccatttgccatctattgaagtaataataggcgcatgcaacttcttttctttttttttcttttctctctcccccgttgttgtctcaccatatccgcaatgacaaaaaaatgatggaagacactaaaggaaaaaattaacgacaaagacagcaccaacagatgtcgttgttccagagctgatgaggggtatctcgaagcacacgaaactttttccttccttcattcacgcacactactctctaatgagcaacggtatacggccttccttccagttacttgaatttgaaataaaaaaaagtttgctgtcttgctatcaagtataaatagacctgcaattattaatcttttgtttcctcgtcattgttctcgttccctttcttccttgtttctttttctgcacaatatttcaagctataccaagcatacaatcaactatctcatatacacatatgtcgtttactttgaccaacaagaacgtgattttcgttgccggtctgggaggcattggtctggacaccagcaaggagctgctcaagcgcgatctgaagaacctggtgatcctcgaccgcattgagaacccggctgccattgccgagctgaaggcaatcaatccaaaggtgaccgtcaccttctacccctatgatgtgaccgtgcccattgccgagaccaccaagctgctgaagaccatcttcgcccagctgaagaccgtcgatgtcctgatcaacggagctggtatcctggacgatcaccagatcgagcgcaccattgccgtcaactacactggcctggtcaacaccacgacggccattctggacttctgggacaagcgcaagggcggtcccggtggtatcatctgcaacattggatccgtcactggattcaatgccatctaccaggtgcccgtctactccggcaccaaggccgccgtggtcaacttcaccagctccctggcgaaactggcccccattaccggcgtgacggcttacactgtgaaccccggcatcacccgcaccaccctggtgcacacgttcaactcctggttggatgttgagcctcaggttgccgagaagctcctggctcatcccacccagccctcgttggcctgcgccgagaacttcgtcaaggctatcgagctgaaccagaacggagccatctggaaactggacttgggcaccctggaggccatccagtggaccaagcactgggactccggcatctaagcggccgcataacaatactgacagtactaaataattgcctacttggcttcacatacgttgcatacgtcgatatagataataatgataatgacagcaggattatcgtaatacgtaatagttgaaaatctcaaaaatgtgtgggtcattacgtaaataatgataggaatgggattcttctatttttcctttttccattctagcagccgtcgggaaaacgtggcatcctctctttcgggctcaattggagtcacgctgccgtgagcatcctctctttccatatctaacaactgagcacgtaaccaatggaaaagcatgagcttagcgttgctccaaaaaagtattggatggttaataccatttgtctgttctcttctgactttgactcctcaaaaaaaaaaaatctacaatcaacagatcgcttcaattacgccctcacaaaaacttttttccttcttcttcgcccacgttaaattttatccctcatgttgtctaacggatttctgcacttgatttattataaaaagacaaagacataatacttctctatcaatttcagttattgttcttccttgcgttattcttctgttcttctttttcttttgtcatatataaccataaccaagtaatacatattcaaactcgagatgtccaaagctacttataaagaaagggctgcaacccatccatccccagtggcagctaaactgtttaacataatgcacgaaaaacaaactaacttatgcgcatcattagatgtaagaactactaaagagctactggagttggttgaggctttaggtccaaaaatttgtttgttgaagacacatgttgacatattaacagatttttctatggagggtaccgttaagcctctgaaagcgttaagcgcgaaatataactttcttttatttgaagaccgtaagtttgctgatattggaaatactgttaagttgcaatatagcgcaggagtttatagaattgccgaatgggctgacattacgaatgcccacggtgttgtaggtcctggcattgtgtctggattgaaacaagcggcagaggaagtgactaaggaaccaagaggtttactaatgctggcggaattatcttgcaaaggctctctagccaccggtgaatatacaaaaggtactgtggatattgcaaagtctgataaggacttcgtaatcggttttattgcacaaagagatatgggaggtcgtgagaattcaaaatgaagtgaagttcctatactttctagagaataggaacttctatagtgagtcgaataagggcgacacaaaatttattctaaatgcataataaatactgataacatcttatagtttgtattatattttgtattatcgttgacatgtataattttgatatcaaaaactgattttccctttattattttcgagatttattttcttaattctctttaacaaactagaaatattgtatatacaaaaaatcataaataatagatgaatagtttaattataggtgttcatcaatcgaaaaagcaacgtatcttatttaaagtgcgttgcttttttctcatttataaggttaaataattctcatatatcaagcaaagtgacaggcgcccttaaatattctgacaaatgctctttccctaaactccccccataaaaaaacccgccgaagcgggtttttacgttatttgcggattaacgattactcgttatcagaaccgcccagggggcccgagcttaagactggccgtcgttttacaacacagaaagagtttgtagaaacgcaaaaaggccatccgtcaggggccttctgcttagtttgatgcctggcagttccctactctcgccttccgcttcctcgctcactgactcgctgcgctcggtcgttcggctgcggcgagcggtatcagctcactcaaaggcggtaatacggttatccacagaatcaggggataacgcaggaaagaacatgtgagcaaaaggccagcaaaaggccaggaaccgtaaaaaggccgcgttgctggcgtttttccataggctccgcccccctgacgagcatcacaaaaatcgacgctcaagtcagaggtggcgaaacccgacaggactataaagataccaggcgtttccccctggaagctccctcgtgcgctctcctgttccgaccctgccgcttaccggatacctgtccgcctttctcccttcgggaagcgtggcgctttctcatagctcacgctgtaggtatctcagttcggtgtaggtcgttcgctccaagctgggctgtgtgcacgaaccccccgttcagcccgaccgctgcgccttatccggtaactatcgtcttgagtccaacccggtaagacacgacttatcgccactggcagcagccactggtaacaggattagcagagcgaggtatgtaggcggtgctacagagttcttgaagtggtgggctaactacggctacactagaagaacagtatttggtatctgcgctctgctgaagccagttaccttcggaaaaagagttggtagctcttgatccggcaaacaaaccaccgctggtagcggtggtttttttgtttgcaagcagcagattacgcgcagaaaaaaaggatctcaagaagatcctttgatcttttctacggggtctgacgctcagtggaacgacgcgcgcgtaactcacgttaagggattttggtcatgagcttgcgccgtcccgtcaagtcagcgtaatgctctgcttt

SEQ ID NO: 16 - DNA, 10801 bp, Artificial Sequence
  Plasmid pGV7101N
tagaaaaactcatcgagcatcaaatgaaactgcaatttattcatatcaggattatcaataccatatttttgaaaaagccgtttctgtaatgaaggagaaaactcaccgaggcagttccataggatggcaagatcctggtatcggtctgcgattccgactcgtccaacatcaatacaacctattaatttcccctcgtcaaaaataaggttatcaagtgagaaatcaccatgagtgacgactgaatccggtgagaatggcaaaagtttatgcatttctttccagacttgttcaacaggccagccattacgctcgtcatcaaaatcactcgcatcaaccaaaccgttattcattcgtgattgcgcctgagcgaggcgaaatacgcgatcgctgttaaaaggacaattacaaacaggaatcgagtgcaaccggcgcaggaacactgccagcgcatcaacaatattttcacctgaatcaggatattcttctaatacctggaacgctgtttttccggggatcgcagtggtgagtaaccatgcatcatcaggagtacggataaaatgcttgatggtcggaagtggcataaattccgtcagccagtttagtctgaccatctcatctgtaacatcattggcaacgctacctttgccatgtttcagaaacaactctggcgcatcgggcttcccatacaagcgatagattgtcgcacctgattgcccgacattatcgcgagcccatttatacccatataaatcagcatccatgttggaatttaatcgcggcctcgacgtttcccgttgaatatggctcatattcttcctttttcaatattattgaagcatttatcagggttattgtctcatgagcggatacatatttgaatgtatttagaaaaataaacaaataggggtcagtgttacaaccaattaaccaattctgaacattatcgcgagcccatttatacctgaatatggctcataacaccccttgtttgcctggcggcagtagcgcggtggtcccacctgaccccatgccgaactcagaagtgaaacgccgtagcgccgatggtagtgtggggactccccatgcgagagtagggaactgccaggcatcaaataaaacgaaaggctcagtcgaaagactgggcctttcgcccgggctaattagggggtgtcgcccttattcgactctatagtgaagttcctattctctagaaagtataggaacttctgaagtggggaagcaaggcagaaactaacttcttcttcatgtaataaacacaccccgcgtttatttacctatctctaaacttcaacaccttatatcataactaatatttcttgagataagcacactgcacccataccttccttaaaaacgtagcttccagtttttggtggttccggcttccttcccgattccgcccgctaaacgcatatttttgttgcctggtggcatttgcaaaatgcataacctatgcatttaaaagattatgtatgctcttctgacttttcgtgtgatgaggctcgtggaaaaaatgaataatttatgaatttgagaacaattttgtgttgttacggtattttactatggaataatcaatcaattgaggattttatgcaaatatcgtttgaatatttttccgaccctttgagtacttttcttcataattgcataatattgtccgctgcccctttttctgttagacggtgtcttgatctacttgctatcgttcaacaccaccttattttctaactattttttttttagctcatttgaatcagcttatggtgatggcacatttttgcataaacctagctgtcctcgttgaacataggaaaaaaaaatatataaacaaggctctttcactctccttgcaatcagatttgggtttgttccctttattttcatatttcttgtcatattcctttctcaattattattttctactcataacctcacgcaaaataacacagtcaaatcaatcaaagtcgagatgctttcactacgtcaatctataagatttttcaagccagccacaagaactttgtgtagctctagatatctgcttatgttgactaaagctacaaaagagcagaaatcattggtgaaaaataggggtgcagaacttgttgtggactgtttggtagaacagggcgtaacacatgtttttggtatcccaggtgcaaaaatcgacgccgtgtttgatgcattacaagacaagggtccagaaattattgttgctagacatgagcaaaatgccgcatttatggcgcaagctgtaggtaggcttacaggtaaacctggtgttgtcctagttacgtctggcccaggagcctccaatttagcaactggtctattgacagctaatactgagggagatcctgtagttgcgttagccggtaatgtaattagagctgataggcttaagagaactcaccagtctctagacaacgctgctttattccaaccgatcaccaagtactcagtagaggtacaagacgtaaagaatatacctgaagctgtgacaaacgcatttcgtatagcttctgctggtcaggctggtgccgcgtttgtttcttttcctcaagacgttgtcaatgaagtgaccaatactaaaaacgttagagcggttgcagcccctaaactaggtccagccgcagacgacgcaattagcgctgcaattgctaaaattcagacggcgaaactaccagtagtccttgtcggtatgaagggcggaagaccagaagcaataaaagctgttcgtaagttattgaagaaagtccaattacctttcgttgagacttaccaagcagcaggtactttatctagagatttagaggatcagtattttggaaggataggtctatttagaaaccaaccaggagatttactattagaacaagctgatgttgtacttactatcggttatgatcctatagagtatgacccaaagttttggaacataaatggggatagaacaattatacatctagacgagataatcgccgacatcgatcacgcttatcaaccagatttagaactaatcggagatatcccgtcaacaatcaatcatattgaacatgatgctgtaaaggttgagttcgctgaacgtgagcagaaaatcttatctgatctaaagcaatatatgcatgagggtgaacaagttccagcagactggaaatctgaccgtgcacatcctttggaaatcgttaaggaactaagaaatgcggtcgatgatcatgtgactgttacatgtgatatcggttcacatgcaatttggatgtcacgttattttaggagctacgaaccattaactttaatgatatctaacgggatgcaaactctgggggttgcacttccttgggctattggcgctagtttagttaagcccggtgagaaggtggtatcggtatcaggtgatggtggctttctgttttcggctatggaattagaaactgcagtccgtttaaaagctcccattgtgcatattgtctggaatgattctacttacgacatggttgcttttcaacagttgaagaaatacaatagaacttcggctgtagactttggtaacatcgatattgtgaaatatgctgagtcttttggcgcaacaggcctgagggtggaaagtccagatcagttagctgatgtgttgagacaagggatgaatgccgagggaccggtaatcatagatgtgccagttgactactcagacaatattaatttggcttctgataaacttcctaaagagtttggcgagctaatgaagaccaaagccttataaggatccataaaaaacacgctttttcagttcgagtttatcattatcaatactgccatttcaaagaatacgtaaataattaatagtagtgattttcctaactttatttagtcaaaaaattagccttttaattctgctgtaacccgtacatgcccaaaatagggggcgggttacacagaatatataacatcgtaggtgtctgggtgaacagtttattcctggcatccactaaatataatggagcccgctttttaagctggcatccagaaaaaaaaagaatcccagcaccaaaatattgttttcttcaccaaccatcagttcataggtccattctcttagcgcaactacagagaacaggggcacaaacaggcaaaaaacgggcacaacctcaatggagtgatgcaacctgcctggagtaaatgatgacacaaggcaattgacccacgcatgtatctatctcattttcttacaccttctattaccttctgctctctctgatttggaaaaagctgaaaaaaaaggttgaaaccagttccctgaaattattcccctacttgactaataagtatataaagacggtaggtattgattgtaattctgtaaatctatttcttaaacttcttaaattctacttttatagttagtcttttttttagttttaaaacaccaagaacttagtttcgaataaacacacataaacaaacaaaaagcttatgtatactgttggagattatttgttagatagattgcatgaactaggcattgaagaaattttcggagttcccggggattacaatctgcaatttctagaccagattatttcacataaagacatgaaatgggtcggaaatgcaaatgagttaaatgcatcttacatggccgatggttatgccagaaccaaaaaggcggctgctttcttgactaccttcggggtgggtgaattatcggcagttaatggcttggctggatcatacgcagaaaacttgcctgtcgttgaaatcgttggctcgccaacatcaaaagttcaaaatgaaggaaaattcgtccaccacactttggcagatggtgacttcaagcacttcatgaaaatgcatgaacctgtaacggctgccagaactctactaactgctgagaatgcaactgtagagattgatcgtgtcttgagcgctcttttaaaggaaagaaagccagtctatattaacctgccagtagacgtcgcagcggccaaagcagagaagcctagcttaccacttaaaaaggaaaatagtacctcaaacacttcagatcaagagattcttaacaagatccaggaatctttgaaaaacgctaaaaagcccattgttataactggccatgagatcatatcatttggtttggagaaaacagtgacccagttcattagtaagacgaaactgccaataaccactctaaatttcggtaagtcctccgttgatgaagcgttgcctagcttcttgggtatttacaacggcaccttgtcagaacccaatctgaaagaatttgttgaatctgcagactttatattgatgttgggagtaaagttgactgacagctctactggtgcttttacacaccatctgaatgaaaacaagatgatatctcttaatatcgatgaaggtaagatattcaatgaaagaatacagaacttcgacttcgagagtctaatttcttccttactggacttaagtgaaatcgagtataaaggtaagtacattgacaaaaagcaggaagattttgttccgagcaacgcgctacttagtcaagatagattatggcaagctgttgaaaatctgacacaatccaatgagacaattgttgccgaacaaggtacctccttttttggcgcttcttccatcttcctaaagtccaagtctcatttcatagggcagccattgtggggtagcatcggttacacctttcctgctgctctagggtcccaaattgctgataaagaaagtagacatttgttgtttataggagacggatctttacaattgacagttcaagagttaggtttagccatcagagagaagattaatcctatctgcttcataataaacaacgatggctatacagttgagagggaaattcatggacctaatcaatcttataatgatataccaatgtggaattatagcaagttacctgaatcttttggggctaccgaggatcgtgttgtttctaagattgtaagaaccgaaaatgaatttgtttctgttatgaaggaagcacaagcggaccctaacaggatgtactggattgagttaattcttgctaaggagggtgcgccaaaggttctaaagaagatgggtaagttgttcgccgaacaaaacaaatccgtgacacatggttataatgtgcagcgatacaatcagttacgtaaaaattttggattttatagagcatattcttcactaagaggttgtaagagcgttttcagacgtatataggctaggtcatgtaattagttatgtcacgcttacattcacgccctccccccacatccgctctaaccgaaaaggaaggagttagacaacctgaagtctaggtccctatttatttttttatagttatgttagtattaagaacgttatttatatttcaaatttttcttttttttctgtacagacgcgtgtacgcatgtaacattatactgaaaaccttgcttgagaaggttttgggacgctcgaaggctttaatttgcgggtgtacaatatggacttcctcttttctggcaaccaaacccatacatcgggattcctataataccttcgttggtctccctaacatgtaggtggcggaggggagatatacaatagaacagataccagacaagacataatgggctaaacaagactacaccaattacactgcctcattgatggtggtacataacgaactaatactgtagccctagacttgatagccatcatcatatcgaagtttcactaccctttttccatttgccatctattgaagtaataataggcgcatgcaacttcttttctttttttttcttttctctctcccccgttgttgtctcaccatatccgcaatgacaaaaaaatgatggaagacactaaaggaaaaaattaacgacaaagacagcaccaacagatgtcgttgttccagagctgatgaggggtatctcgaagcacacgaaactttttccttccttcattcacgcacactactctctaatgagcaacggtatacggccttccttccagttacttgaatttgaaataaaaaaaagtttgctgtcttgctatcaagtataaatagacctgcaattattaatcttttgtttcctcgtcattgttctcgttccctttcttccttgtttctttttctgcacaatatttcaagctataccaagcatacaatcaactatctcatatacacatatgttgagaacgtcaacattgttcaccaggcgtgtccaaccaagcctattttctagaaacattcttagattgcaatccacagctgcaatgtcgtttactttgaccaacaagaacgtgattttcgttgccggtctgggaggcattggtctggacaccagcaaggagctgctcaagcgcgatctgaagaacctggtgatcctcgaccgcattgagaacccggctgccattgccgagctgaaggcaatcaatccaaaggtgaccgtcaccttctacccctatgatgtgaccgtgcccattgccgagaccaccaagctgctgaagaccatcttcgcccagctgaagaccgtcgatgtcctgatcaacggagctggtatcctggacgatcaccagatcgagcgcaccattgccgtcaactacactggcctggtcaacaccacgacggccattctggacttctgggacaagcgcaagggcggtcccggtggtatcatctgcaacattggatccgtcactggattcaatgccatctaccaggtgcccgtctactccggcaccaaggccgccgtggtcaacttcaccagctccctggcgaaactggcccccattaccggcgtgacggcttacactgtgaaccccggcatcacccgcaccaccctggtgcacacgttcaactcctggttggatgttgagcctcaggttgccgagaagctcctggctcatcccacccagccctcgttggcctgcgccgagaacttcgtcaaggctatcgagctgaaccagaacggagccatctggaaactggacttgggcaccctggaggccatccagtggaccaagcactgggactccggcatctaagcggccgcataacaatactgacagtactaaataattgcctacttggcttcacatacgttgcatacgtcgatatagataataatgataatgacagcaggattatcgtaatacgtaatagttgaaaatctcaaaaatgtgtgggtcattacgtaaataatgataggaatgggattcttctatttttcctttttccattctagcagccgtcgggaaaacgtggcatcctctctttcgggctcaattggagtcacgctgccgtgagcatcctctctttccatatctaacaactgagcacgtaaccaatggaaaagcatgagcttagcgttgctccaaaaaagtattggatggttaataccatttgtctgttctcttctgactttgactcctcaaaaaaaaaaaatctacaatcaacagatcgcttcaattacgccctcacaaaaacttttttccttcttcttcgcccacgttaaattttatccctcatgttgtctaacggatttctgcacttgatttattataaaaagacaaagacataatacttctctatcaatttcagttattgttcttccttgcgttattcttctgttcttctttttcttttgtcatatataaccataaccaagtaatacatattcaaactcgagatgtccaaagctacttataaagaaagggctgcaacccatccatccccagtggcagctaaactgtttaacataatgcacgaaaaacaaactaacttatgcgcatcattagatgtaagaactactaaagagctactggagttggttgaggctttaggtccaaaaatttgtttgttgaagacacatgttgacatattaacagatttttctatggagggtaccgttaagcctctgaaagcgttaagcgcgaaatataactttcttttatttgaagaccgtaagtttgctgatattggaaatactgttaagttgcaatatagcgcaggagtttatagaattgccgaatgggctgacattacgaatgcccacggtgttgtaggtcctggcattgtgtctggattgaaacaagcggcagaggaagtgactaaggaaccaagaggtttactaatgctggcggaattatcttgcaaaggctctctagccaccggtgaatatacaaaaggtactgtggatattgcaaagtctgataaggacttcgtaatcggttttattgcacaaagagatatgggaggtcgtgagaattcaaaatgaagtgaagttcctatactttctagagaataggaacttctatagtgagtcgaataagggcgacacaaaatttattctaaatgcataataaatactgataacatcttatagtttgtattatattttgtattatcgttgacatgtataattttgatatcaaaaactgattttccctttattattttcgagatttattttcttaattctctttaacaaactagaaatattgtatatacaaaaaatcataaataatagatgaatagtttaattataggtgttcatcaatcgaaaaagcaacgtatcttatttaaagtgcgttgcttttttctcatttataaggttaaataattctcatatatcaagcaaagtgacaggcgcccttaaatattctgacaaatgctctttccctaaactccccccataaaaaaacccgccgaagcgggtttttacgttatttgcggattaacgattactcgttatcagaaccgcccagggggcccgagcttaagactggccgtcgttttacaacacagaaagagtttgtagaaacgcaaaaaggccatccgtcaggggccttctgcttagtttgatgcctggcagttccctactctcgccttccgcttcctcgctcactgactcgctgcgctcggtcgttcggctgcggcgagcggtatcagctcactcaaaggcggtaatacggttatccacagaatcaggggataacgcaggaaagaacatgtgagcaaaaggccagcaaaaggccaggaaccgtaaaaaggccgcgttgctggcgtttttccataggctccgcccccctgacgagcatcacaaaaatcgacgctcaagtcagaggtggcgaaacccgacaggactataaagataccaggcgtttccccctggaagctccctcgtgcgctctcctgttccgaccctgccgcttaccggatacctgtccgcctttctcccttcgggaagcgtggcgctttctcatagctcacgctgtaggtatctcagttcggtgtaggtcgttcgctccaagctgggctgtgtgcacgaaccccccgttcagcccgaccgctgcgccttatccggtaactatcgtcttgagtccaacccggtaagacacgacttatcgccactggcagcagccactggtaacaggattagcagagcgaggtatgtaggcggtgctacagagttcttgaagtggtgggctaactacggctacactagaagaacagtatttggtatctgcgctctgctgaagccagttaccttcggaaaaagagttggtagctcttgatccggcaaacaaaccaccgctggtagcggtggtttttttgtttgcaagcagcagattacgcgcagaaaaaaaggatctcaagaagatcctttgatcttttctacggggtctgacgctcagtggaacgacgcgcgcgtaactcacgttaagggattttggtcatgagcttgcgccgtcccgtcaagtcagcgtaatgctctgcttt

SEQ ID NO: 17 - DNA, 10616 bp, Artificial Sequence
  Plasmid pGV9834N
tagaaaaactcatcgagcatcaaatgaaactgcaatttattcatatcaggattatcaataccatatttttgaaaaagccgtttctgtaatgaaggagaaaactcaccgaggcagttccataggatggcaagatcctggtatcggtctgcgattccgactcgtccaacatcaatacaacctattaatttcccctcgtcaaaaataaggttatcaagtgagaaatcaccatgagtgacgactgaatccggtgagaatggcaaaagtttatgcatttctttccagacttgttcaacaggccagccattacgctcgtcatcaaaatcactcgcatcaaccaaaccgttattcattcgtgattgcgcctgagcgaggcgaaatacgcgatcgctgttaaaaggacaattacaaacaggaatcgagtgcaaccggcgcaggaacactgccagcgcatcaacaatattttcacctgaatcaggatattcttctaatacctggaacgctgtttttccggggatcgcagtggtgagtaaccatgcatcatcaggagtacggataaaatgcttgatggtcggaagtggcataaattccgtcagccagtttagtctgaccatctcatctgtaacatcattggcaacgctacctttgccatgtttcagaaacaactctggcgcatcgggcttcccatacaagcgatagattgtcgcacctgattgcccgacattatcgcgagcccatttatacccatataaatcagcatccatgttggaatttaatcgcggcctcgacgtttcccgttgaatatggctcatattcttcctttttcaatattattgaagcatttatcagggttattgtctcatgagcggatacatatttgaatgtatttagaaaaataaacaaataggggtcagtgttacaaccaattaaccaattctgaacattatcgcgagcccatttatacctgaatatggctcataacaccccttgtttgcctggcggcagtagcgcggtggtcccacctgaccccatgccgaactcagaagtgaaacgccgtagcgccgatggtagtgtggggactccccatgcgagagtagggaactgccaggcatcaaataaaacgaaaggctcagtcgaaagactgggcctttcgcccgggctaattagggggtgtcgcccttattcgactctatagtgaagttcctattctctagaaagtataggaacttctgaagtggggagatctcaccagtaaaacatacgcatacacatacacacatagagcaagcaagcaggctagcaaccaggaaaggctgccagtgactgctactgggtgtctaagaaccgtagggcggattattgttgcggtggttggttgcgggtggttatgcgatggtacggtgcagaatcgtacggtgttggttatggaattagtatgggtatgtgatatgtggtaatatgtgatattgggttattgtgatttggaatactgaatatcgaatatgggatatggaatatggccatggcatggtatggtatgggatgggagtattctattttattttattttattctggttcctgcgtttagggtagggtaggaagaaggtgagtgcttttgtatataagtggagtgtctggatcagttttgtggattgtgaatgttagtttcccctttaatgtatatttgtattatttgcttttgagtactcaataaccaagcacaactactagttttaaaggatccatcctcttaaacagtacaaatcgcaaagaaaagctccacacccaaaccaaataattgcagtcgagatgctttcactacgtcaatctataagatttttcaagccagccacaagaactttgtgtagctctagatatctgcttatgttgactaaagctacaaaagagcagaaatcattggtgaaaaataggggtgcagaacttgttgtggactgtttggtagaacagggcgtaacacatgtttttggtatcccaggtgcaaaaatcgacgccgtgtttgatgcattacaagacaagggtccagaaattattgttgctagacatgagcaaaatgccgcatttatggcgcaagctgtaggtaggcttacaggtaaacctggtgttgtcctagttacgtctggcccaggagcctccaatttagcaactggtctattgacagctaatactgagggagatcctgtagttgcgttagccggtaatgtaattagagctgataggcttaagagaactcaccagtctctagacaacgctgctttattccaaccgatcaccaagtactcagtagaggtacaagacgtaaagaatatacctgaagctgtgacaaacgcatttcgtatagcttctgctggtcaggctggtgccgcgtttgtttcttttcctcaagacgttgtcaatgaagtgaccaatactaaaaacgttagagcggttgcagcccctaaactaggtccagccgcagacgacgcaattagcgctgcaattgctaaaattcagacggcgaaactaccagtagtccttgtcggtatgaagggcggaagaccagaagcaataaaagctgttcgtaagttattgaagaaagtccaattacctttcgttgagacttaccaagcagcaggtactttatctagagatttagaggatcagtattttggaaggataggtctatttagaaaccaaccaggagatttactattagaacaagctgatgttgtacttactatcggttatgatcctatagagtatgacccaaagttttggaacataaatggggatagaacaattatacatctagacgagataatcgccgacatcgatcacgcttatcaaccagatttagaactaatcggagatatcccgtcaacaatcaatcatattgaacatgatgctgtaaaggttgagttcgctgaacgtgagcagaaaatcttatctgatctaaagcaatatatgcatgagggtgaacaagttccagcagactggaaatctgaccgtgcacatcctttggaaatcgttaaggaactaagaaatgcggtcgatgatcatgtgactgttacatgtgatatcggttcacatgcaatttggatgtcacgttattttaggagctacgaaccattaactttaatgatatctaacgggatgcaaactctgggggttgcacttccttgggctattggcgctagtttagttaagcccggtgagaaggtggtatcggtatcaggtgatggtggctttctgttttcggctatggaattagaaactgcagtccgtttaaaagctcccattgtgcatattgtctggaatgattctacttacgacatggttgcttttcaacagttgaagaaatacaatagaacttcggctgtagactttggtaacatcgatattgtgaaatatgctgagtcttttggcgcaacaggcctgagggtggaaagtccagatcagttagctgatgtgttgagacaagggatgaatgccgagggaccggtaatcatagatgtgccagttgactactcagacaatattaatttggcttctgataaacttcctaaagagtttggcgagctaatgaagaccaaagccttataaggatccataaaaaacacgctttttcagttcgagtttatcattatcaatactgccatttcaaagaatacgtaaataattaatagtagtgattttcctaactttatttagtcaaaaaattagccttttaattctgctgtaacccgtacatgcccaaaatagggggcgggttacacagaatatataacatcgtaggtgtctgggtgaacagtttattcctggcatccactaaatataatggagcccgctttttaagctggcatccagaaaaaaaaagaatcccagcaccaaaatattgttttcttcaccaaccatcagttcataggtccattctcttagcgcaactacagagaacaggggcacaaacaggcaaaaaacgggcacaacctcaatggagtgatgcaacctgcctggagtaaatgatgacacaaggcaattgacccacgcatgtatctatctcattttcttacaccttctattaccttctgctctctctgatttggaaaaagctgaaaaaaaaggttgaaaccagttccctgaaattattcccctacttgactaataagtatataaagacggtaggtattgattgtaattctgtaaatctatttcttaaacttcttaaattctacttttatagttagtcttttttttagttttaaaacaccaagaacttagtttcgaataaacacacataaacaaacaaaaagcttatgtatactgttggagattatttgttagatagattgcatgaactaggcattgaagaaattttcggagttcccggggattacaatctgcaatttctagaccagattatttcacataaagacatgaaatgggtcggaaatgcaaatgagttaaatgcatcttacatggccgatggttatgccagaaccaaaaaggcggctgctttcttgactaccttcggggtgggtgaattatcggcagttaatggcttggctggatcatacgcagaaaacttgcctgtcgttgaaatcgttggctcgccaacatcaaaagttcaaaatgaaggaaaattcgtccaccacactttggcagatggtgacttcaagcacttcatgaaaatgcatgaacctgtaacggctgccagaactctactaactgctgagaatgcaactgtagagattgatcgtgtcttgagcgctcttttaaaggaaagaaagccagtctatattaacctgccagtagacgtcgcagcggccaaagcagagaagcctagcttaccacttaaaaaggaaaatagtacctcaaacacttcagatcaagagattcttaacaagatccaggaatctttgaaaaacgctaaaaagcccattgttataactggccatgagatcatatcatttggtttggagaaaacagtgacccagttcattagtaagacgaaactgccaataaccactctaaatttcggtaagtcctccgttgatgaagcgttgcctagcttcttgggtatttacaacggcaccttgtcagaacccaatctgaaagaatttgttgaatctgcagactttatattgatgttgggagtaaagttgactgacagctctactggtgcttttacacaccatctgaatgaaaacaagatgatatctcttaatatcgatgaaggtaagatattcaatgaaagaatacagaacttcgacttcgagagtctaatttcttccttactggacttaagtgaaatcgagtataaaggtaagtacattgacaaaaagcaggaagattttgttccgagcaacgcgctacttagtcaagatagattatggcaagctgttgaaaatctgacacaatccaatgagacaattgttgccgaacaaggtacctccttttttggcgcttcttccatcttcctaaagtccaagtctcatttcatagggcagccattgtggggtagcatcggttacacctttcctgctgctctagggtcccaaattgctgataaagaaagtagacatttgttgtttataggagacggatctttacaattgacagttcaagagttaggtttagccatcagagagaagattaatcctatctgcttcataataaacaacgatggctatacagttgagagggaaattcatggacctaatcaatcttataatgatataccaatgtggaattatagcaagttacctgaatcttttggggctaccgaggatcgtgttgtttctaagattgtaagaaccgaaaatgaatttgtttctgttatgaaggaagcacaagcggaccctaacaggatgtactggattgagttaattcttgctaaggagggtgcgccaaaggttctaaagaagatgggtaagttgttcgccgaacaaaacaaatccgtgacacatggttataatgtgcagcgatacaatcagttacgtaaaaattttggattttatagagcatattcttcactaagaggttgtaagagcgttttcagacgtatataggctaggtcatgtaattagttatgtcacgcttacattcacgccctccccccacatccgctctaaccgaaaaggaaggagttagacaacctgaagtctaggtccctatttatttttttatagttatgttagtattaagaacgttatttatatttcaaatttttcttttttttctgtacagacgcgtgtacgcatgtaacattatactgaaaaccttgcttgagaaggttttgggacgctcgaaggctttaatttgcgggtgtacaatatggacttcctcttttctggcaaccaaacccatacatcgggattcctataataccttcgttggtctccctaacatgtaggtggcggaggggagatatacaatagaacagataccagacaagacataatgggctaaacaagactacaccaattacactgcctcattgatggtggtacataacgaactaatactgtagccctagacttgatagccatcatcatatcgaagtttcactaccctttttccatttgccatctattgaagtaataataggcgcatgcaacttcttttctttttttttcttttctctctcccccgttgttgtctcaccatatccgcaatgacaaaaaaatgatggaagacactaaaggaaaaaattaacgacaaagacagcaccaacagatgtcgttgttccagagctgatgaggggtatctcgaagcacacgaaactttttccttccttcattcacgcacactactctctaatgagcaacggtatacggccttccttccagttacttgaatttgaaataaaaaaaagtttgctgtcttgctatcaagtataaatagacctgcaattattaatcttttgtttcctcgtcattgttctcgttccctttcttccttgtttctttttctgcacaatatttcaagctataccaagcatacaatcaactatctcatatacacatatgttgagaacgtcaacattgttcaccaggcgtgtccaaccaagcctattttctagaaacattcttagattgcaatccacagctgcaatgtcgtttactttgaccaacaagaacgtgattttcgttgccggtctgggaggcattggtctggacaccagcaaggagctgctcaagcgcgatctgaagaacctggtgatcctcgaccgcattgagaacccggctgccattgccgagctgaaggcaatcaatccaaaggtgaccgtcaccttctacccctatgatgtgaccgtgcccattgccgagaccaccaagctgctgaagaccatcttcgcccagctgaagaccgtcgatgtcctgatcaacggagctggtatcctggacgatcaccagatcgagcgcaccattgccgtcaactacactggcctggtcaacaccacgacggccattctggacttctgggacaagcgcaagggcggtcccggtggtatcatctgcaacattggatccgtcactggattcaatgccatctaccaggtgcccgtctactccggcaccaaggccgccgtggtcaacttcaccagctccctggcgaaactggcccccattaccggcgtgacggcttacactgtgaaccccggcatcacccgcaccaccctggtgcacacgttcaactcctggttggatgttgagcctcaggttgccgagaagctcctggctcatcccacccagccctcgttggcctgcgccgagaacttcgtcaaggctatcgagctgaaccagaacggagccatctggaaactggacttgggcaccctggaggccatccagtggaccaagcactgggactccggcatctaagcggccgcataacaatactgacagtactaaataattgcctacttggcttcacatacgttgcatacgtcgatatagataataatgataatgacagcaggattatcgtaatacgtaatagttgaaaatctcaaaaatgtgtgggtcattacgtaaataatgataggaatgggattcttctatttttcctttttccattctagcagccgtcgggaaaacgtggcatcctctctttcgggctcaattggagtcacgctgccgtgagcatcctctctttccatatctaacaactgagcacgtaaccaatggaaaagcatgagcttagcgttgctccaaaaaagtattggatggttaataccatttgtctgttctcttctgactttgactcctcaaaaaaaaaaaatctacaatcaacagatcgcttcaattacgccctcacaaaaacttttttccttcttcttcgcccacgttaaattttatccctcatgttgtctaacggatttctgcacttgatttattataaaaagacaaagacataatacttctctatcaatttcagttattgttcttccttgcgttattcttctgttcttctttttcttttgtcatatataaccataaccaagtaatacatattcaaactcgagatgtccaaagctacttataaagaaagggctgcaacccatccatccccagtggcagctaaactgtttaacataatgcacgaaaaacaaactaacttatgcgcatcattagatgtaagaactactaaagagctactggagttggttgaggctttaggtccaaaaatttgtttgttgaagacacatgttgacatattaacagatttttctatggagggtaccgttaagcctctgaaagcgttaagcgcgaaatataactttcttttatttgaagaccgtaagtttgctgatattggaaatactgttaagttgcaatatagcgcaggagtttatagaattgccgaatgggctgacattacgaatgcccacggtgttgtaggtcctggcattgtgtctggattgaaacaagcggcagaggaagtgactaaggaaccaagaggtttactaatgctggcggaattatcttgcaaaggctctctagccaccggtgaatatacaaaaggtactgtggatattgcaaagtctgataaggacttcgtaatcggttttattgcacaaagagatatgggaggtcgtgagaattcaaaatgaagtgaagttcctatactttctagagaataggaacttctatagtgagtcgaataagggcgacacaaaatttattctaaatgcataataaatactgataacatcttatagtttgtattatattttgtattatcgttgacatgtataattttgatatcaaaaactgattttccctttattattttcgagatttattttcttaattctctttaacaaactagaaatattgtatatacaaaaaatcataaataatagatgaatagtttaattataggtgttcatcaatcgaaaaagcaacgtatcttatttaaagtgcgttgcttttttctcatttataaggttaaataattctcatatatcaagcaaagtgacaggcgcccttaaatattctgacaaatgctctttccctaaactccccccataaaaaaacccgccgaagcgggtttttacgttatttgcggattaacgattactcgttatcagaaccgcccagggggcccgagcttaagactggccgtcgttttacaacacagaaagagtttgtagaaacgcaaaaaggccatccgtcaggggccttctgcttagtttgatgcctggcagttccctactctcgccttccgcttcctcgctcactgactcgctgcgctcggtcgttcggctgcggcgagcggtatcagctcactcaaaggcggtaatacggttatccacagaatcaggggataacgcaggaaagaacatgtgagcaaaaggccagcaaaaggccaggaaccgtaaaaaggccgcgttgctggcgtttttccataggctccgcccccctgacgagcatcacaaaaatcgacgctcaagtcagaggtggcgaaacccgacaggactataaagataccaggcgtttccccctggaagctccctcgtgcgctctcctgttccgaccctgccgcttaccggatacctgtccgcctttctcccttcgggaagcgtggcgctttctcatagctcacgctgtaggtatctcagttcggtgtaggtcgttcgctccaagctgggctgtgtgcacgaaccccccgttcagcccgaccgctgcgccttatccggtaactatcgtcttgagtccaacccggtaagacacgacttatcgccactggcagcagccactggtaacaggattagcagagcgaggtatgtaggcggtgctacagagttcttgaagtggtgggctaactacggctacactagaagaacagtatttggtatctgcgctctgctgaagccagttaccttcggaaaaagagttggtagctcttgatccggcaaacaaaccaccgctggtagcggtggtttttttgtttgcaagcagcagattacgcgcagaaaaaaaggatctcaagaagatcctttgatcttttctacggggtctgacgctcagtggaacgacgcgcgcgtaactcacgttaagggattttggtcatgagcttgcgccgtcccgtcaagtcagcgtaatgctctgcttt

SEQ ID NO: 18 - DNA, 13970 bp, Artificial Sequence
  Plasmid pGV8000
tagaaaaactcatcgagcatcaaatgaaactgcaatttattcatatcaggattatcaataccatatttttgaaaaagccgtttctgtaatgaaggagaaaactcaccgaggcagttccataggatggcaagatcctggtatcggtctgcgattccgactcgtccaacatcaatacaacctattaatttcccctcgtcaaaaataaggttatcaagtgagaaatcaccatgagtgacgactgaatccggtgagaatggcaaaagtttatgcatttctttccagacttgttcaacaggccagccattacgctcgtcatcaaaatcactcgcatcaaccaaaccgttattcattcgtgattgcgcctgagcgaggcgaaatacgcgatcgctgttaaaaggacaattacaaacaggaatcgagtgcaaccggcgcaggaacactgccagcgcatcaacaatattttcacctgaatcaggatattcttctaatacctggaacgctgtttttccggggatcgcagtggtgagtaaccatgcatcatcaggagtacggataaaatgcttgatggtcggaagtggcataaattccgtcagccagtttagtctgaccatctcatctgtaacatcattggcaacgctacctttgccatgtttcagaaacaactctggcgcatcgggcttcccatacaagcgatagattgtcgcacctgattgcccgacattatcgcgagcccatttatacccatataaatcagcatccatgttggaatttaatcgcggcctcgacgtttcccgttgaatatggctcatattcttcctttttcaatattattgaagcatttatcagggttattgtctcatgagcggatacatatttgaatgtatttagaaaaataaacaaataggggtcagtgttacaaccaattaaccaattctgaacattatcgcgagcccatttatacctgaatatggctcataacaccccttgtttgcctggcggcagtagcgcggtggtcccacctgaccccatgccgaactcagaagtgaaacgccgtagcgccgatggtagtgtggggactccccatgcgagagtagggaactgccaggcatcaaataaaacgaaaggctcagtcgaaagactgggcctttcgcccgggctaattagggggtgtcgcccttattcgactctatagtgaagttcctattctctagaaagtataggaacttctgaagtgggggtaccataaaaaacacgctttttcagttcgagtttatcattatcaatactgccatttcaaagaatacgtaaataattaatagtagtgattttcctaactttatttagtcaaaaaattagccttttaattctgctgtaacccgtacatgcccaaaatagggggcgggttacacagaatatataacatcgtaggtgtctgggtgaacagtttattcctggcatccactaaatataatggagcccgctttttaagctggcatccagaaaaaaaaagaatcccagcaccaaaatattgttttcttcaccaaccatcagttcataggtccattctcttagcgcaactacagagaacaggggcacaaacaggcaaaaaacgggcacaacctcaatggagtgatgcaacctgcctggagtaaatgatgacacaaggcaattgacccacgcatgtatctatctcattttcttacaccttctattaccttctgctctctctgatttggaaaaagctgaaaaaaaaggttgaaaccagttccctgaaattattcccctacttgactaataagtatataaagacggtaggtattgattgtaattctgtaaatctatttcttaaacttcttaaattctacttttatagttagtcttttttttagttttaaaacaccaagaacttagtttcgaataaacacacataaacaaacaaaaagcttatgtccccttctaaaatgaatgctacagtaggatctacttccgaagttgaacaaaaaatcagacaagaattggctcttagtgacgaagtcaccaccatcagacgcaatgctccagctgccgttttgtatgaagatggtctaaaagaaaataaaactgtcatttcatcaagcggtgcattgatcgcttattccggtgttaaaaccggaaggtctccaaaggacaaacgtattgttgaagaacctacctcgaaagacgaaatttggtggggtccggtcaataaaccatgttctgaaagaacatggtctatcaaccgtgaaagagctgcagattacttgagaacaagagaccacatttatattgtcgatgcatttgcaggatgggacccaaaatacagaatcaaagtccgcgttgtttgtgccagggcttaccacgctttattcatgacaaatatgcttattagacctacagaagaagaattagcccattttggagaacctgattttactgtctggaacgctggtcagttcccagccaatttacacacccaggatatgtcttcaaagagtactatagaaattaacttcaaagcaatggaaatgatcattttagggaccgaatacgccggtgaaatgaaaaaaggtattttcacagttatgttttacttgatgcctgtgcaccataacgttttaactttgcactcttccgccaaccagggtattcaaaacggtgacgttactttattctttggcctaagtgggaccgggaaaaccactttatccgcagacccacatagattgttgatcggcgatgatgaacattgttggtccgaccatggtgtcttcaatatcgaaggtggttgttacgccaagtgtattaatttatctgccgaaaaggagcctgaaattttcgacgctatcaagtttggttctgtattagaaaacgttatctatgacgagaagtcgcatgtagtggactatgacgactcttctattactgaaaatactagatgtgcctacccaattgactacattccaagtgccaagattccatgtttggcggactctcatccaaagaacattatcctgctaacttgtgatgcttcgggtgttttaccaccagtatctaaattgactcctgaacaagtcatgtaccatttcatctctggttacacttctaaaatggctggtactgagcaaggtgtcactgaacctgaaccaacattttcatcttgtttcggacaacccttcctagccttgcaccctattagatacgcaaccatgttagctacaaagatgtctcaacataaagctaatgcgtacttaatcaacaccggctggactggttcttcctacgtatctggtggtaaacgttgcccattgaagtacacaagggccattctggattctattcatgatggttcgttagccaatgaaacgtacgaaactttaccgattttcaatcttcaagtacctaccaaggtgaacggtgttccagctgagcttttgaatcctgctaaaaactggtctcaaggtgaatccaaatacagaggtgcagttaccaacttggccaacttgtttgttcaaaatttcaagatttatcaagacagagccacaccagatgtattagccgctggtcctcaattcgagtaacctaggtcatgtaattagttatgtcacgcttacattcacgccctccccccacatccgctctaaccgaaaaggaaggagttagacaacctgaagtctaggtccctatttatttttttatagttatgttagtattaagaacgttatttatatttcaaatttttcttttttttctgtacagacgcgtgtacgcatgtaacattatactgaaaaccttgcttgagaaggttttgggacgctcgaaggctttaatttgcgggtgtacaatatggacttcctcttttctggcaaccaaacccatacatcgggattcctataataccttcgttggtctccctaacatgtaggtggcggaggggagatatacaatagaacagataccagacaagacataatgggctaaacaagactacaccaattacactgcctcattgatggtggtacataacgaactaatactgtagccctagacttgatagccatcatcatatcgaagtttcactaccctttttccatttgccatctattgaagtaataataggcgcatgcaacttcttttctttttttttcttttctctctcccccgttgttgtctcaccatatccgcaatgacaaaaaaatgatggaagacactaaaggaaaaaattaacgacaaagacagcaccaacagatgtcgttgttccagagctgatgaggggtatctcgaagcacacgaaactttttccttccttcattcacgcacactactctctaatgagcaacggtatacggccttccttccagttacttgaatttgaaataaaaaaaagtttgctgtcttgctatcaagtataaatagacctgcaattattaatcttttgtttcctcgtcattgttctcgttccctttcttccttgtttctttttctgcacaatatttcaagctataccaagcatacaatcaactatctcatatacagctagcatgcctcactcagttacaccatccatagaacaagattcgttaaaaattgccattttaggtgctgccggtggtatcgggcagtcgttatcgctgcttttgaaagctcagttgcaataccagttaaaggagagcaaccggagcgttacccacattcatctggctctttacgatgtcaaccaagaagccatcaacggtgttaccgccgacttgtctcatatagacacccccatttccgtgtcgagccactctcctgcaggtggcattgagaactgtttgcataacgcttctattgttgtcattcctgcaggtgttccaagaaaacctggcatgactcgtgatgacttatttaacgtgaatgctggtatcattagccagctcggtgattctattgcagaatgttgtgatctttccaaggtcttcgttcttgtcatttccaaccctgttaattctttagtcccagtgatggtttctaacattcttaagaaccatcctcagtctagaaattccggcattgaaagaaggatcatgggtgtcaccaagctcgacattgtcagagcgtccacttttctacgtgagataaacattgagtcagggctaactcctcgtgtgaactccatgcctgacgtccctgtaattggcgggcattctggcgagactattattccgttgttttcacagtcaaacttcctatcgagattaaatgaggatcaattgaaatatttaatacatagagtccaatacggtggtgatgaagtggtcaaggccaagaacggtaaaggtagtgctaccttatcgatggcccatgccggttataagtgtgttgtccaatttgtttctttgttattgggtaacattgagcagatccatggaacctactatgtgccattaaaagatgcgaacaacttccccattgctcctggggcagatcaattattgcctctggtggacggtgcagactactttgccataccattaactattactacaaagggtgtttcctatgtggattatgacatcgttaataggatgaacgacatggaacgcaaccaaatgttgccaatttgcgtctcccagttaaagaaaaatatcgataagggcttggaattcgttgcatcgaggtctgcatcatcttaagcggccgcataacaatactgacagtactaaataattgcctacttggcttcacatacgttgcatacgtcgatatagataataatgataatgacagcaggattatcgtaatacgtaatagttgaaaatctcaaaaatgtgtgggtcattacgtaaataatgataggaatgggattcttctatttttcctttttccattctagcagccgtcgggaaaacgtggcatcctctctttcgggctcaattggagtcacgctgccgtgagcatcctctctttccatatctaacaactgagcacgtaaccaatggaaaagcatgagcttagcgttgctccaaaaaagtattggatggttaataccatttgtctgttctcttctgactttgactcctcaaaaaaaaaaaatctacaatcaacagatcgcttcaattacgccctcacaaaaacttttttccttcttcttcgcccacgttaaattttatccctcatgttgtctaacggatttctgcacttgatttattataaaaagacaaagacataatacttctctatcaatttcagttattgttcttccttgcgttattcttctgttcttctttttcttttgtcatatataaccataaccaagtaatacatattcaaactcgagatgtcaaccaacgcaaaagagtctgccggtaagaatatcaagtatccatggtggtacggaggtgcagcgggtatctttgctaccatggtgacacatcctcttgacttggccaaagtcagactgcaggcggctcctatgcccaagcccacactcttcaggatgttggagagtatcttggcgaatgaaggtgtggtggggttatattccggcctgagcgctgctgtgttgaggcaatgtacatacacgacggtgagattcggtgcatacgacttgttgaaagagaatgtgatcccacgcgagcaattgactaacatggcgtatcttttaccttgctccatgttcagtggtgccattggggggcttgcagggaattttgcagatgttgtaaatatcagaatgcaaaacgactctgctttggaggcagcgaagaggagaaactacaaaaacgctatcgatggtgtgtacaagatatatcgctacgagggtggactgaaaaccttgtttaccggttggaagcctaacatggttaggggcatactgatgacggcaagtcaggtcgttacgtatgacgtgtttaagaactacttggtcacaaaattagatttcgacgcatccaagaactatacacacttgacagcgtccctgttggctggcctggtggccaccactgtgtgctctccagcagacgtcatgaagacacgtatcatgaacggcagcggagaccatcaaccggctttgaagatccttgccgacgctgtccgcaaagagggcccatctttcatgttccgggggtggttgccaagtttcactagactgggtccattcacaatgttaattttctttgcaattgagcaattgaaaaaacatagggttggcatgccaaaggaagacaagtagagatcttgtttaaagattacggatatttaacttacttagaataatgccatttttttgagttataataatcctacgttagtgtgagcgggatttaaactgtgaggaccttaatacattcagacacttctgcggtatcaccctacttattcccttcgagattatatctaggaacccatcaggttggtggaagattacccgttctaagacttttcagcttcctctattgatgttacacctggacaccccttttctggcatccagtttttaatcttcagtggcatgtgagattctccgaaattaattaaagcaatcacacaattctctcggataccacctcggttgaaactgacaggtggtttgttacgcatgctaatgcaaaggagcctatatacctttggctcggctgctgtaacagggaatataaagggcagcataatttaggagtttagtgaacttgcaacatttactattttcccttcttacgtaaatatttttctttttaattctaaatcaatctttttcaattttttgtttgtattcttttcttgcttaaatctataactacaaaaaacacatacataaactaaaagtcgacatgcttagaaccagactatccgtttccgttgctgctagatcgcaactaaccagatccttgacagcatcaaggacagcaccattaagaagatggcctattcagcaatcgcgtttatattcttctaacactagatcgcataaagctaccacaacaagagaaaatactttccaaaagccatacagcgacgaggaggtcactaaaacacccgtcggttctcgcgccagaaagatattcgaagctcctcacccacatgccactcgtttgactgtagaaggtgccatagaatgtcccttggagagctttcaacttttaaactctcctttatttaacaagggttctgcatttacacaagaagaaagggaagcgtttaatttagaagcattgctaccaccacaagtgaacactttggacgaacaactggaaagaagctacaagcagttatgctatttgaagacgcccttggccaaaaacgacttcatgacgtctttgagagtacagaacaaagtcctatattttgcattaataaggagacatatcaaggaattagttcctatcatttacaccccaaccgaaggtgatgctattgctgcctattcccacaggttcagaaagccagaaggtgtgtttttagacattaccgaacctgattccatcgaatgtagattggctacatacggtggagacaaagatgtagactacatcgttgtgtcggattcggaaggtattctgggaattggtgaccaaggtatcggtggtgtacgtattgctatctccaaattggcattgatgacgctgtgcggtggtattcatcccggccgtgtgctacctgtgtgtttggacgtcggtactaacaacaagaaactagcccgtgacgaattgtacatgggtaacaagttctccagaatcaggggtaagcaatatgacgacttcttggaaaaattcatcaaggccgttaagaaagtgtatccaagcgccgttctgcatttcgaagatttcggtgttaagaacgctagaagattactagaaaagtacaggtacgaattgccatcattcaacgatgacattcagggcaccggtgccgtcgtgatggcctcgttgattgctgctttgaaacataccaacagagacttgaaagacaccagagtgcttatttacggtgccgggtctgcgggcctcggtatcgcagatcaaattgtgaatcatatggtcacgcacggcgttgacaaggaagaagcgcgcaagaaaatcttcttgatggacagacgtgggttaattctacaatcttacgaggctaactccactcccgcccaacacgtatacgctaagagtgatgcggaatgggctggtatcaacacccgctctttacatgatgtggtggagaacgtcaaaccaacgtgtttggttggctgctccacacaagcaggcgcattcactcaagatgtcgtagaagaaatgcacaagcacaatcctagaccgatcattttcccattatccaaccctactagactacacgaagccgttcctgccgatttaatgaagtggaccaacaacaacgctcttgtagctaccggatctcctttcccacctgttgatggttaccgtatctcggagaacaacaattgttactctttcccaggtatcggtttaggtgccgtactatcgcgtgccaccaccatcacagacaagatgatctccgctgcagtggaccaactagccgaattgtcgccactaagagagggcgactccagacctgggttgctacccggcctggacaccatcaccaacacttctgcgcgtctagctaccgctgtgatcttgcaagcactggaggagggaaccgcccgtatcgagcaagaacaagtaccgggaggagctcccggcgaaactgtcaaggttcctcgtgactttgacgaatgtttacagtgggtcaaagcccaaatgtgggagcctgtgtacagacctatgatcaaggtccaacatgacccatcggtgcacaccaaccaattgtagggatcccatagcttcaaaatgtttctactccttttttactcttccagattttctcggactccgcgcatcgccgtaccacttcaaaacacccaagcacagcatactaaatttcccctctttcttcctctagggtgtcgttaattacccgtactaaaggtttggaaaagaaaaaagagaccgcctcgtttctttttcttcgtcgaaaaaggcaataaaaatttttatcacgtttctttttcttgaaaattttttttttgatttttttctctttcgatgacctcccattgatatttaagttaataaacggtcttcaatttctcaagtttcagtttcatttttcttgttctattacaactttttttacttcttgctcattagaaagaaagcatagcaatctaatctaagtttatgggtaaaaagcctgaactcaccgcgacgtctgtcgagaagtttctgatcgaaaagttcgacagcgtctccgacctgatgcagctctcggagggcgaagaatctcgtgctttcagcttcgatgtaggagggcgtggatatgtcctgcgggtaaatagctgcgccgatggtttctacaaagatcgttatgtttatcggcactttgcatcggccgcgctcccgattccggaagtgcttgacattggggagttcagcgagagcctgacctattgcatctcccgccgtgcacagggtgtcacgttgcaagacctgcctgaaaccgaactgcccgctgttctccagccggtcgcggaggccatggatgcgatcgctgcggccgatcttagccagacgagcgggttcggcccattcggaccgcaaggaatcggtcaatacactacatggcgtgatttcatatgcgcgattgctgatccccatgtgtatcactggcaaactgtgatggacgacaccgtcagtgcgtccgtcgcgcaggctctcgatgagctgatgctttgggccgaggactgccccgaagtccggcacctcgtgcatgcggatttcggctccaacaatgtcctgacggacaatggccgcataacagcggtcattgactggagcgaggcgatgttcggggattcccaatacgaggtcgccaacatcctcttctggaggccgtggttggcttgtatggagcagcagacgcgctacttcgagcggaggcatccggagcttgcaggatcgccgcgcctccgggcgtatatgctccgcattggtcttgaccaactctatcagagcttggttgacggcaatttcgatgatgcagcttgggcgcagggtcgatgcgacgcaatcgtccgatccggagccgggactgtcgggcgtacacaaatcgcccgcagaagcgcggccgtctggaccgatggctgtgtagaagtactcgccgatagtggaaaccgacgccccagcactcgtccgagggcaaaggaataagccattagtagtgtactcaaacgaattattgttgcaaataaataaacttacacagtttgaatacataaatcaatcagacaaataaatacatcggttcaaattatactaaatctaaatactacgttatcgccgtgaattacgcaattcgcatgttacgtactgcgcgtctcttgttgaatatctaccaattgggaaaaagaactcgtatttcattcccctttttggaaaggggtggggagagactgttgttcagccacgtcaattattattttttctttggccctgcgcttgtcttataaaattccgcagccgcctcttattttttttttttttttcgatttttggcccacaggtcatattgcaaaaaccgaatggccgcgcccccctcacgcacgggacggaagaagggcggcgtcccctgtttttctgctttggctcatctctttggctccgacggacgaaagacgggattccccctcccgtgtctttttataaataacaagtgctcattctgcatccttccttgtttcccgtcgtttgggtacaatgcgttaacctatgcactgtggattctatgtacttggcaatagatgagcatttcaatgaaggaaacgcctgagtcagttatgtaaaaagtactacgtacggaccaatcgaagtgtgtaagagaatgtgacatcaattgttgttgcatcatgtccattggaatatgcagatcggctgtggcatttggccaaaatgttatagagttcacaccttattcacatactttttcattttctgtggctttcaagggtgggggcggtagtgataaccattctctaaacaaaagcccatgtcccacaccaaaggatgtttttttatatcacgttcccttttcataaaacacaaaagaacgaatactttttaagccgaatgagtgacagaaaaagcccacaacttatcaagtgatattgaacaaagggcgaaactgcgcaaaaaaaaaaaaaaaagaaaaagatagtgtagtagtgataaactggtgcttcaatttctttttatgaattgatctgtatctgcacctagatcgatttgattacaggataagggatatggtgcgattcgcgagcttttaccaatatgtataaaaggcggctgtttgaagccattctatcttaatcttgtgctattgcagtcctcgccggcaaaatgaagtgaagttcctatactttctagagaataggaacttctatagtgagtcgaataagggcgacacaaaatttattctaaatgcataataaatactgataacatcttatagtttgtattatattttgtattatcgttgacatgtataattttgatatcaaaaactgattttccctttattattttcgagatttattttcttaattctctttaacaaactagaaatattgtatatacaaaaaatcataaataatagatgaatagtttaattataggtgttcatcaatcgaaaaagcaacgtatcttatttaaagtgcgttgcttttttctcatttataaggttaaataattctcatatatcaagcaaagtgacaggcgcccttaaatattctgacaaatgctctttccctaaactccccccataaaaaaacccgccgaagcgggtttttacgttatttgcggattaacgattactcgttatcagaaccgcccagggggcccgagcttaagactggccgtcgttttacaacacagaaagagtttgtagaaacgcaaaaaggccatccgtcaggggccttctgcttagtttgatgcctggcagttccctactctcgccttccgcttcctcgctcactgactcgctgcgctcggtcgttcggctgcggcgagcggtatcagctcactcaaaggcggtaatacggttatccacagaatcaggggataacgcaggaaagaacatgtgagcaaaaggccagcaaaaggccaggaaccgtaaaaaggccgcgttgctggcgtttttccataggctccgcccccctgacgagcatcacaaaaatcgacgctcaagtcagaggtggcgaaacccgacaggactataaagataccaggcgtttccccctggaagctccctcgtgcgctctcctgttccgaccctgccgcttaccggatacctgtccgcctttctcccttcgggaagcgtggcgctttctcatagctcacgctgtaggtatctcagttcggtgtaggtcgttcgctccaagctgggctgtgtgcacgaaccccccgttcagcccgaccgctgcgccttatccggtaactatcgtcttgagtccaacccggtaagacacgacttatcgccactggcagcagccactggtaacaggattagcagagcgaggtatgtaggcggtgctacagagttcttgaagtggtgggctaactacggctacactagaagaacagtatttggtatctgcgctctgctgaagccagttaccttcggaaaaagagttggtagctcttgatccggcaaacaaaccaccgctggtagcggtggtttttttgtttgcaagcagcagattacgcgcagaaaaaaaggatctcaagaagatcctttgatcttttctacggggtctgacgctcagtggaacgacgcgcgcgtaactcacgttaagggattttggtcatgagcttgcgccgtcccgtcaagtcagcgtaatgctctgcttt

SEQ ID NO: 19 - DNA, 9537 bp, Artificial Sequence
  Plasmid pGV9000
tagaaaaactcatcgagcatcaaatgaaactgcaatttattcatatcaggattatcaataccatatttttgaaaaagccgtttctgtaatgaaggagaaaactcaccgaggcagttccataggatggcaagatcctggtatcggtctgcgattccgactcgtccaacatcaatacaacctattaatttcccctcgtcaaaaataaggttatcaagtgagaaatcaccatgagtgacgactgaatccggtgagaatggcaaaagtttatgcatttctttccagacttgttcaacaggccagccattacgctcgtcatcaaaatcactcgcatcaaccaaaccgttattcattcgtgattgcgcctgagcgaggcgaaatacgcgatcgctgttaaaaggacaattacaaacaggaatcgagtgcaaccggcgcaggaacactgccagcgcatcaacaatattttcacctgaatcaggatattcttctaatacctggaacgctgtttttccggggatcgcagtggtgagtaaccatgcatcatcaggagtacggataaaatgcttgatggtcggaagtggcataaattccgtcagccagtttagtctgaccatctcatctgtaacatcattggcaacgctacctttgccatgtttcagaaacaactctggcgcatcgggcttcccatacaagcgatagattgtcgcacctgattgcccgacattatcgcgagcccatttatacccatataaatcagcatccatgttggaatttaatcgcggcctcgacgtttcccgttgaatatggctcatattcttcctttttcaatattattgaagcatttatcagggttattgtctcatgagcggatacatatttgaatgtatttagaaaaataaacaaataggggtcagtgttacaaccaattaaccaattctgaacattatcgcgagcccatttatacctgaatatggctcataacaccccttgtttgcctggcggcagtagcgcggtggtcccacctgaccccatgccgaactcagaagtgaaacgccgtagcgccgatggtagtgtggggactccccatgcgagagtagggaactgccaggcatcaaataaaacgaaaggctcagtcgaaagactgggcctttcgcccgggctaattagggggtgtcgcccttattcgactctatagtgaagttcctattctctagaaagtataggaacttctgaagtgggggtaccataaaaaacacgctttttcagttcgagtttatcattatcaatactgccatttcaaagaatacgtaaataattaatagtagtgattttcctaactttatttagtcaaaaaattagccttttaattctgctgtaacccgtacatgcccaaaatagggggcgggttacacagaatatataacatcgtaggtgtctgggtgaacagtttattcctggcatccactaaatataatggagcccgctttttaagctggcatccagaaaaaaaaagaatcccagcaccaaaatattgttttcttcaccaaccatcagttcataggtccattctcttagcgcaactacagagaacaggggcacaaacaggcaaaaaacgggcacaacctcaatggagtgatgcaacctgcctggagtaaatgatgacacaaggcaattgacccacgcatgtatctatctcattttcttacaccttctattaccttctgctctctctgatttggaaaaagctgaaaaaaaaggttgaaaccagttccctgaaattattcccctacttgactaataagtatataaagacggtaggtattgattgtaattctgtaaatctatttcttaaacttcttaaattctacttttatagttagtcttttttttagttttaaaacaccaagaacttagtttcgaataaacacacataaacaaacaaagaattcatggagtcccggattatcaatgaccctaaagcccagtcgtttcaacttgtccgccatgcttcggttatttcgtccattccgccctggttaccctctaagggttcatcagctacatactctaccggtgctactgctcctgtcccacccaccgtcccctataagcaacttacagttggcgtcccgcgcgaaacctaccccaatgaacgccgtgtggccttaactcctcaaaatgtcgcttttctgctcaagaaaggtttcggaaaggtccttgttgaaaaaggagctggtgccgaggccgagttccatgattctgcctacgcaacagctggtgcaacacttgtcgagtctgcttctgatgtatggaacaacgccgatatcgtactcaaggtccgcggtcccagtgttgctgaagcggaaatgctcaaagagggtcaaacgattattagcttcctccaaccggcccaaaacaagccgcttgtggaaaagcttgcctctcggaatgccactgtttttgccatggacatgatccctcgcatctctagggcacaggtctttgatgcgctgagcagcatggccaacatcgccggttacaaagcagttctggaagcctcaaatgtgtttggtcgatttcttacaggtcaggttacagcagctggaaagatcccaccttgcaaagtcttggtcattggtgccggcgttgctggattgagtgccattgccacggccagaagaatgggagctattgtccgcggtttcgatactcgctccgctgcgcgtgaacaggttcagtccctcggcgccgagttcatcgaagtcgaactccaggaagacggttctggtgctggaggttacgccaaggaaatgtcgccagagttcatcgcagccgaaatgaagctgttcacagagcaagcccaagaagttgacatgattatcactacggccttgattcccggcaagccagcgcccaagctcatcaccaaagccatggtcgagattatgaagcctggctctgtgattgttgatctggcggccgaggctggagggaattgcgaagtgactcagcccggaaagcttatcaactataaggatgttaagatcattggctacactgacctcccctctcgccttcccactcagtcttccaccttgtactcgaacaatatcaccaaatttctcctttcgatggcgccaaacaaccaggaatacggcattgaccttcaagacgaagttgtcaggggtgcaattgtcattaacaaggggaacatcctcccgccagcacctcgaccagcaccaccaccggcaccagcagcaaccccgaccacagctaaggaagcagaagtcgtggccctgacgccgttccagaaggcttcgcgtgaagtaggtcttgtcacaagtggtatgggcgctgctcttgcgttgggaaagctcactgggccattgttcatgggcaacgcctttaccttcgccttggcctcgcttatcggttaccgtgtggtatggggagtccaacctgcgctccacagcccgttaatgagcgtcaccaacgcaatctcaggcatggtgggagtgggcggtcttttcatcttgggcgggggctacctccctgaaaccattcctcaggctttcggcgctgcttccgtgcttctcgcatttgtcaatatctctggcgggtttgtcattaccaaacgaatgctcgatatgttccgtcgtgccactgaccctccggaatacccgtggctgtacgctgttcccgccgccttatttggaggtggcttcattgccgccgcggcttcaggtgcagctggtttggtccaggccggctacttagttagctccgtgctttgcatcacctcgctttcgtctctggcatctcaaacaaccgcacgcctgggaaacacgcttggtatgttgggtgtaggatctggggtccttgcttccctgcttgctgctggtttctcacccgaggtccttacacagttcggcggtttggctgcgattggtggtatcttgggtttgcttattgggaagcgcatcacacccaccgaccttccacagacagttgccgctctccattccgttgttggcttggccgctgtgctcaccagtatcggaagtgttatggctgatgtgaatcatattacgactcttcatctcgttaccgcctacctcggtgttcttattggtggtgtgacgttcactgggtcaatcgtggctttcttgaagcttgccgggaaaatgtcctccaagccaaccattttacctggccgacacctgattaactcgggtcttttggcttccaatgttgccaccatgggtgcctttgtcacaatggcccctggttctccagcaatcgctgccggtgctctagctgcaaacactgttctatcattcctcaagggctacaccacaaccgcggccattggcggtgccgacatgccggtggtcatcacagttttgaacgcttatagcggctttgctcttgttgctgaaggcttcatgttggataacccactacttaccacagtgggcgcactcatcggcgtatcaggctccatcctctcgtacatcatgtgcgtggccatgaaccgttcactcaccaacgttctattcggtggaatatctgctccaacaacgacagagtacaagatagaaggaagcataacgcagaccaatgtcgaagacacagccgaagccctaactaacgcagagacagtaataattgtcgtaggatatggcatggccgtagccaaagcgcagtacgccatatcagacattacccaaatgttgcgctccaagggcatcaaagtgcgcttcgccattcaccccgtggccggtcgcatgcctggtcagtgcaacgttcttctagcagaagctagcgtgccgtatgacattgtactggagatggatgagatcaacgatgactttggtgagacggatctcactcttgtcattggagcgaacgacactgtcaacccaattgccttggagccaggcagctctattgctggaatgcccgttttgcatgcttggaagagcaagcaggtcgtggtgatgaagagaggtttggctagtggatatgccgacgtaccgaatcctatgttctatatgccgggcacaaagatgctcttcggcgacgcaagagtcacaacagaagccatcaaagccgcaattgaggcccggcttaagtgacctaggtcatgtaattagttatgtcacgcttacattcacgccctccccccacatccgctctaaccgaaaaggaaggagttagacaacctgaagtctaggtccctatttatttttttatagttatgttagtattaagaacgttatttatatttcaaatttttcttttttttctgtacagacgcgtgtacgcatgtaacattatactgaaaaccttgcttgagaaggttttgggacgctcgaaggctttaatttgcgctagcgcggccgcggatcccatagcttcaaaatgtttctactccttttttactcttccagattttctcggactccgcgcatcgccgtaccacttcaaaacacccaagcacagcatactaaatttcccctctttcttcctctagggtgtcgttaattacccgtactaaaggtttggaaaagaaaaaagagaccgcctcgtttctttttcttcgtcgaaaaaggcaataaaaatttttatcacgtttctttttcttgaaaattttttttttgatttttttctctttcgatgacctcccattgatatttaagttaataaacggtcttcaatttctcaagtttcagtttcatttttcttgttctattacaactttttttacttcttgctcattagaaagaaagcatagcaatctaatctaagtttatgggtaaaaagcctgaactcaccgcgacgtctgtcgagaagtttctgatcgaaaagttcgacagcgtctccgacctgatgcagctctcggagggcgaagaatctcgtgctttcagcttcgatgtaggagggcgtggatatgtcctgcgggtaaatagctgcgccgatggtttctacaaagatcgttatgtttatcggcactttgcatcggccgcgctcccgattccggaagtgcttgacattggggagttcagcgagagcctgacctattgcatctcccgccgtgcacagggtgtcacgttgcaagacctgcctgaaaccgaactgcccgctgttctccagccggtcgcggaggccatggatgcgatcgctgcggccgatcttagccagacgagcgggttcggcccattcggaccgcaaggaatcggtcaatacactacatggcgtgatttcatatgcgcgattgctgatccccatgtgtatcactggcaaactgtgatggacgacaccgtcagtgcgtccgtcgcgcaggctctcgatgagctgatgctttgggccgaggactgccccgaagtccggcacctcgtgcatgcggatttcggctccaacaatgtcctgacggacaatggccgcataacagcggtcattgactggagcgaggcgatgttcggggattcccaatacgaggtcgccaacatcctcttctggaggccgtggttggcttgtatggagcagcagacgcgctacttcgagcggaggcatccggagcttgcaggatcgccgcgcctccgggcgtatatgctccgcattggtcttgaccaactctatcagagcttggttgacggcaatttcgatgatgcagcttgggcgcagggtcgatgcgacgcaatcgtccgatccggagccgggactgtcgggcgtacacaaatcgcccgcagaagcgcggccgtctggaccgatggctgtgtagaagtactcgccgatagtggaaaccgacgccccagcactcgtccgagggcaaaggaataagccattagtagtgtactcaaacgaattattgttgcaaataaataaacttacacagtttgaatacataaatcaatcagacaaataaatacatcggttcaaattatactaaatctaaatactacgttatcgccgtgaattacgcaattcgcatgttacgtactgcgcgtctcttgttgaatatctaccaattgggaaaaagaactcgtatttcattcccctttttggaaaggggtggggagagactgttgttcagccacgtcaattattattttttctttggccctgcgcttgtcttataaaattccgcagccgcctcttattttttttttttttttcgatttttggcccacaggtcatattgcaaaaaccgaatggccgcgcccccctcacgcacgggacggaagaagggcggcgtcccctgtttttctgctttggctcatctctttggctccgacggacgaaagacgggattccccctcccgtgtctttttataaataacaagtgctcattctgcatccttccttgtttcccgtcgtttgggtacaatgcgttaacctatgcactgtggattctatgtacttggcaatagatgagcatttcaatgaaggaaacgcctgagtcagttatgtaaaaagtactacgtacggaccaatcgaagtgtgtaagagaatgtgacatcaattgttgttgcatcatgtccattggaatatgcagatcggctgtggcatttggccaaaatgttatagagttcacaccttattcacatactttttcattttctgtggctttcaagggtgggggcggtagtgataaccattctctaaacaaaagcccatgtcccacaccaaaggatgtttttttatatcacgttcccttttcataaaacacaaaagaacgaatactttttaagccgaatgagtgacagaaaaagcccacaacttatcaagtgatattgaacaaagggcgaaactgcgcaaaaaaaaaaaaaaaagaaaaagatagtgtagtagtgataaactggtgcttcaatttctttttatgaattgatctgtatctgcacctagatcgatttgattacaggataagggatatggtgcgattcgcgagcttttaccaatatgtataaaaggcggctgtttgaagccattctatcttaatcttgtgctattgcagtcctcgccggcaaaatgaagtgaagttcctatactttctagagaataggaacttctatagtgagtcgaataagggcgacacaaaatttattctaaatgcataataaatactgataacatcttatagtttgtattatattttgtattatcgttgacatgtataattttgatatcaaaaactgattttccctttattattttcgagatttattttcttaattctctttaacaaactagaaatattgtatatacaaaaaatcataaataatagatgaatagtttaattataggtgttcatcaatcgaaaaagcaacgtatcttatttaaagtgcgttgcttttttctcatttataaggttaaataattctcatatatcaagcaaagtgacaggcgcccttaaatattctgacaaatgctctttccctaaactccccccataaaaaaacccgccgaagcgggtttttacgttatttgcggattaacgattactcgttatcagaaccgcccagggggcccgagcttaagactggccgtcgttttacaacacagaaagagtttgtagaaacgcaaaaaggccatccgtcaggggccttctgcttagtttgatgcctggcagttccctactctcgccttccgcttcctcgctcactgactcgctgcgctcggtcgttcggctgcggcgagcggtatcagctcactcaaaggcggtaatacggttatccacagaatcaggggataacgcaggaaagaacatgtgagcaaaaggccagcaaaaggccaggaaccgtaaaaaggccgcgttgctggcgtttttccataggctccgcccccctgacgagcatcacaaaaatcgacgctcaagtcagaggtggcgaaacccgacaggactataaagataccaggcgtttccccctggaagctccctcgtgcgctctcctgttccgaccctgccgcttaccggatacctgtccgcctttctcccttcgggaagcgtggcgctttctcatagctcacgctgtaggtatctcagttcggtgtaggtcgttcgctccaagctgggctgtgtgcacgaaccccccgttcagcccgaccgctgcgccttatccggtaactatcgtcttgagtccaacccggtaagacacgacttatcgccactggcagcagccactggtaacaggattagcagagcgaggtatgtaggcggtgctacagagttcttgaagtggtgggctaactacggctacactagaagaacagtatttggtatctgcgctctgctgaagccagttaccttcggaaaaagagttggtagctcttgatccggcaaacaaaccaccgctggtagcggtggtttttttgtttgcaagcagcagattacgcgcagaaaaaaaggatctcaagaagatcctttgatcttttctacggggtctgacgctcagtggaacgacgcgcgcgtaactcacgttaagggattttggtcatgagcttgcgccgtcccgtcaagtcagcgtaatgctctgcttt

SEQ ID NO: 20 - DNA, 10862 bp, Artificial Sequence
  Plasmid pGV1835
tagaaaaactcatcgagcatcaaatgaaactgcaatttattcatatcaggattatcaataccatatttttgaaaaagccgtttctgtaatgaaggagaaaactcaccgaggcagttccataggatggcaagatcctggtatcggtctgcgattccgactcgtccaacatcaatacaacctattaatttcccctcgtcaaaaataaggttatcaagtgagaaatcaccatgagtgacgactgaatccggtgagaatggcaaaagtttatgcatttctttccagacttgttcaacaggccagccattacgctcgtcatcaaaatcactcgcatcaaccaaaccgttattcattcgtgattgcgcctgagcgaggcgaaatacgcgatcgctgttaaaaggacaattacaaacaggaatcgagtgcaaccggcgcaggaacactgccagcgcatcaacaatattttcacctgaatcaggatattcttctaatacctggaacgctgtttttccggggatcgcagtggtgagtaaccatgcatcatcaggagtacggataaaatgcttgatggtcggaagtggcataaattccgtcagccagtttagtctgaccatctcatctgtaacatcattggcaacgctacctttgccatgtttcagaaacaactctggcgcatcgggcttcccatacaagcgatagattgtcgcacctgattgcccgacattatcgcgagcccatttatacccatataaatcagcatccatgttggaatttaatcgcggcctcgacgtttcccgttgaatatggctcatattcttcctttttcaatattattgaagcatttatcagggttattgtctcatgagcggatacatatttgaatgtatttagaaaaataaacaaataggggtcagtgttacaaccaattaaccaattctgaacattatcgcgagcccatttatacctgaatatggctcataacaccccttgtttgcctggcggcagtagcgcggtggtcccacctgaccccatgccgaactcagaagtgaaacgccgtagcgccgatggtagtgtggggactccccatgcgagagtagggaactgccaggcatcaaataaaacgaaaggctcagtcgaaagactgggcctttcgcccgggctaattagggggtgtcgcccttattcgactctatagtgaagttcctattctctagaaagtataggaacttctgaagtggggagatctcaccagtaaaacatacgcatacacatacacacatagagcaagcaagcaggctagcaaccaggaaaggctgccagtgactgctactgggtgtctaagaaccgtagggcggattattgttgcggtggttggttgcgggtggttatgcgatggtacggtgcagaatcgtacggtgttggttatggaattagtatgggtatgtgatatgtggtaatatgtgatattgggttattgtgatttggaatactgaatatcgaatatgggatatggaatatggccatggcatggtatggtatgggatgggagtattctattttattttattttattctggttcctgcgtttagggtagggtaggaagaaggtgagtgcttttgtatataagtggagtgtctggatcagttttgtggattgtgaatgttagtttcccctttaatgtatatttgtattatttgcttttgagtactcaataaccaagcacaactactagttttaaaggatccatcctcttaaacagtacaaatcgcaaagaaaagctccacacccaaaccaaataattgcagtcgagatgctttcactacgtcaatctataagatttttcaagccagccacaagaactttgtgtagctctagatatctgcttcagcaaaaacccgtggtgatgttgactaaagctacaaaagagcagaaatcattggtgaaaaataggggtgcagaacttgttgtggactgtttggtagaacagggcgtaacacatgtttttggtatcccaggtgcaaaaatcgacgccgtgtttgatgcattacaagacaagggtccagaaattattgttgctagacatgagcaaaatgccgcatttatggcgcaagctgtaggtaggcttacaggtaaacctggtgttgtcctagttacgtctggcccaggagcctccaatttagcaactggtctattgacagctaatactgagggagatcctgtagttgcgttagccggtaatgtaattagagctgataggcttaagagaactcaccagtctctagacaacgctgctttattccaaccgatcaccaagtactcagtagaggtacaagacgtaaagaatatacctgaagctgtgacaaacgcatttcgtatagcttctgctggtcaggctggtgccgcgtttgtttcttttcctcaagacgttgtcaatgaagtgaccaatactaaaaacgttagagcggttgcagcccctaaactaggtccagccgcagacgacgcaattagcgctgcaattgctaaaattcagacggcgaaactaccagtagtccttgtcggtatgaagggcggaagaccagaagcaataaaagctgttcgtaagttattgaagaaagtccaattacctttcgttgagacttaccaagcagcaggtactttatctagagatttagaggatcagtattttggaaggataggtctatttagaaaccaaccaggagatttactattagaacaagctgatgttgtacttactatcggttatgatcctatagagtatgacccaaagttttggaacataaatggggatagaacaattatacatctagacgagataatcgccgacatcgatcacgcttatcaaccagatttagaactaatcggagatatcccgtcaacaatcaatcatattgaacatgatgctgtaaaggttgagttcgctgaacgtgagcagaaaatcttatctgatctaaagcaatatatgcatgagggtgaacaagttccagcagactggaaatctgaccgtgcacatcctttggaaatcgttaaggaactaagaaatgcggtcgatgatcatgtgactgttacatgtgatatcggttcacatgcaatttggatgtcacgttattttaggagctacgaaccattaactttaatgatatctaacgggatgcaaactctgggggttgcacttccttgggctattggcgctagtttagttaagcccggtgagaaggtggtatcggtatcaggtgatggtggctttctgttttcggctatggaattagaaactgcagtccgtttaaaagctcccattgtgcatattgtctggaatgattctacttacgacatggttgcttttcaacagttgaagaaatacaatagaacttcggctgtagactttggtaacatcgatattgtgaaatatgctgagtcttttggcgcaacaggcctgagggtggaaagtccagatcagttagctgatgtgttgagacaagggatgaatgccgagggaccggtaatcatagatgtgccagttgactactcagacaatattaatttggcttctgataaacttcctaaagagtttggcgagctaatgaagaccaaagccttataaggatccataaaaaacacgctttttcagttcgagtttatcattatcaatactgccatttcaaagaatacgtaaataattaatagtagtgattttcctaactttatttagtcaaaaaattagccttttaattctgctgtaacccgtacatgcccaaaatagggggcgggttacacagaatatataacatcgtaggtgtctgggtgaacagtttattcctggcatccactaaatataatggagcccgctttttaagctggcatccagaaaaaaaaagaatcccagcaccaaaatattgttttcttcaccaaccatcagttcataggtccattctcttagcgcaactacagagaacaggggcacaaacaggcaaaaaacgggcacaacctcaatggagtgatgcaacctgcctggagtaaatgatgacacaaggcaattgacccacgcatgtatctatctcattttcttacaccttctattaccttctgctctctctgatttggaaaaagctgaaaaaaaaggttgaaaccagttccctgaaattattcccctacttgactaataagtatataaagacggtaggtattgattgtaattctgtaaatctatttcttaaacttcttaaattctacttttatagttagtcttttttttagttttaaaacaccaagaacttagtttcgaataaacacacataaacaaacaaaaagcttatgtatactgttggagattatttgttagatagattgcatgaactaggcattgaagaaattttcggagttcccggggattacaatctgcaatttctagaccagattatttcacataaagacatgaaatgggtcggaaatgcaaatgagttaaatgcatcttacatggccgatggttatgccagaaccaaaaaggcggctgctttcttgactaccttcggggtgggtgaattatcggcagttaatggcttggctggatcatacgcagaaaacttgcctgtcgttgaaatcgttggctcgccaacatcaaaagttcaaaatgaaggaaaattcgtccaccacactttggcagatggtgacttcaagcacttcatgaaaatgcatgaacctgtaacggctgccagaactctactaactgctgagaatgcaactgtagagattgatcgtgtcttgagcgctcttttaaaggaaagaaagccagtctatattaacctgccagtagacgtcgcagcggccaaagcagagaagcctagcttaccacttaaaaaggaaaatagtacctcaaacacttcagatcaagagattcttaacaagatccaggaatctttgaaaaacgctaaaaagcccattgttataactggccatgagatcatatcatttggtttggagaaaacagtgacccagttcattagtaagacgaaactgccaataaccactctaaatttcggtaagtcctccgttgatgaagcgttgcctagcttcttgggtatttacaacggcaccttgtcagaacccaatctgaaagaatttgttgaatctgcagactttatattgatgttgggagtaaagttgactgacagctctactggtgcttttacacaccatctgaatgaaaacaagatgatatctcttaatatcgatgaaggtaagatattcaatgaaagaatacagaacttcgacttcgagagtctaatttcttccttactggacttaagtgaaatcgagtataaaggtaagtacattgacaaaaagcaggaagattttgttccgagcaacgcgctacttagtcaagatagattatggcaagctgttgaaaatctgacacaatccaatgagacaattgttgccgaacaaggtacctccttttttggcgcttcttccatcttcctaaagtccaagtctcatttcatagggcagccattgtggggtagcatcggttacacctttcctgctgctctagggtcccaaattgctgataaagaaagtagacatttgttgtttataggagacggatctttacaattgacagttcaagagttaggtttagccatcagagagaagattaatcctatctgcttcataataaacaacgatggctatacagttgagagggaaattcatggacctaatcaatcttataatgatataccaatgtggaattatagcaagttacctgaatcttttggggctaccgaggatcgtgttgtttctaagattgtaagaaccgaaaatgaatttgtttctgttatgaaggaagcacaagcggaccctaacaggatgtactggattgagttaattcttgctaaggagggtgcgccaaaggttctaaagaagatgggtaagttgttcgccgaacaaaacaaatccgtgacacatggttataatgtgcagcgatacaatcagttacgtaaaaattttggattttatagagcatattcttcactaagaggttgtaagagcgttttcagacgtatataggctaggtcatgtaattagttatgtcacgcttacattcacgccctccccccacatccgctctaaccgaaaaggaaggagttagacaacctgaagtctaggtccctatttatttttttatagttatgttagtattaagaacgttatttatatttcaaatttttcttttttttctgtacagacgcgtgtacgcatgtaacattatactgaaaaccttgcttgagaaggttttgggacgctcgaaggctttaatttgcgggtgtacaatatggacttcctcttttctggcaaccaaacccatacatcgggattcctataataccttcgttggtctccctaacatgtaggtggcggaggggagatatacaatagaacagataccagacaagacataatgggctaaacaagactacaccaattacactgcctcattgatggtggtacataacgaactaatactgtagccctagacttgatagccatcatcatatcgaagtttcactaccctttttccatttgccatctattgaagtaataataggcgcatgcaacttcttttctttttttttcttttctctctcccccgttgttgtctcaccatatccgcaatgacaaaaaaatgatggaagacactaaaggaaaaaattaacgacaaagacagcaccaacagatgtcgttgttccagagctgatgaggggtatctcgaagcacacgaaactttttccttccttcattcacgcacactactctctaatgagcaacggtatacggccttccttccagttacttgaatttgaaataaaaaaaagtttgctgtcttgctatcaagtataaatagacctgcaattattaatcttttgtttcctcgtcattgttctcgttccctttcttccttgtttctttttctgcacaatatttcaagctataccaagcatacaatcaactatctcatatacacatatgttatatccagagaaattccaaggcattggtatctccaacgcaaaggattggaagcatcctaaacttgttagtttcgaccccaaacctttcggtgaccatgacgttgatgttgagattgaagcatgtggaatatgtgggagcgattttcatattgcagtaggcaattggggccctgttccggaaaatcaaattttgggtcacgaaattattggtagggtagtgaaggtgggttcaaaatgtcacacgggtgttaagattggtgatagggttggtgtaggtgcccaagcattggcttgtttcgaatgcgaaagatgcaaaagtgataacgaacaatactgtaccaacgatcatgttctaacaatgtggactccttacaaagatggatacatatctcaaggtggatttgcatcacatgttagattgcatgagcattttgcaattcaaattccggagaatatcccatcacctttggctgcaccattattgtgtgggggaataacagtgtttagtcctttattgagaaacggttgtggacctggtaagcgtgtggggattgttggcataggtggtattggtcacatggggatattactagctaaggccatgggagccgaagtttatgcgttcagtagaggacactccaagcgtgaagacagtatgaagttaggggcggaccattatattgccatgttggaggataaaggctggaccgaacaatattcaaatgctcttgatctgttagttgtgtgtagttcttctcttagtaaagttaattttgactcgattgtgaaaataatgaagattggcggctccattgtttccattgctgctccagaagttaacgagaagctggtactaaaaccactgggtctgatgggggtatctatctcatcttctgctatcggttcaagaaaagaaatagaacagctattaaagctagtcagcgagaaaaatgtgaagatttgggtagagaagctacccataagcgaggagggtgtatctcacgcatttacgagaatggaatccggagatgttaagtacaggtttacacttgtagactatgacaagaaattccataagtgagcggccgcataacaatactgacagtactaaataattgcctacttggcttcacatacgttgcatacgtcgatatagataataatgataatgacagcaggattatcgtaatacgtaatagttgaaaatctcaaaaatgtgtgggtcattacgtaaataatgataggaatgggattcttctatttttcctttttccattctagcagccgtcgggaaaacgtggcatcctctctttcgggctcaattggagtcacgctgccgtgagcatcctctctttccatatctaacaactgagcacgtaaccaatggaaaagcatgagcttagcgttgctccaaaaaagtattggatggttaataccatttgtctgttctcttctgactttgactcctcaaaaaaaaaaaatctacaatcaacagatcgcttcaattacgccctcacaaaaacttttttccttcttcttcgcccacgttaaattttatccctcatgttgtctaacggatttctgcacttgatttattataaaaagacaaagacataatacttctctatcaatttcagttattgttcttccttgcgttattcttctgttcttctttttcttttgtcatatataaccataaccaagtaatacatattcaaactcgagatgtccaaagctacttataaagaaagggctgcaacccatccatccccagtggcagctaaactgtttaacataatgcacgaaaaacaaactaacttatgcgcatcattagatgtaagaactactaaagagctactggagttggttgaggctttaggtccaaaaatttgtttgttgaagacacatgttgacatattaacagatttttctatggagggtaccgttaagcctctgaaagcgttaagcgcgaaatataactttcttttatttgaagaccgtaagtttgctgatattggaaatactgttaagttgcaatatagcgcaggagtttatagaattgccgaatgggctgacattacgaatgcccacggtgttgtaggtcctggcattgtgtctggattgaaacaagcggcagaggaagtgactaaggaaccaagaggtttactaatgctggcggaattatcttgcaaaggctctctagccaccggtgaatatacaaaaggtactgtggatattgcaaagtctgataaggacttcgtaatcggttttattgcacaaagagatatgggaggtcgtgagaattcaaaatgaagtgaagttcctatactttctagagaataggaacttctatagtgagtcgaataagggcgacacaaaatttattctaaatgcataataaatactgataacatcttatagtttgtattatattttgtattatcgttgacatgtataattttgatatcaaaaactgattttccctttattattttcgagatttattttcttaattctctttaacaaactagaaatattgtatatacaaaaaatcataaataatagatgaatagtttaattataggtgttcatcaatcgaaaaagcaacgtatcttatttaaagtgcgttgcttttttctcatttataaggttaaataattctcatatatcaagcaaagtgacaggcgcccttaaatattctgacaaatgctctttccctaaactccccccataaaaaaacccgccgaagcgggtttttacgttatttgcggattaacgattactcgttatcagaaccgcccagggggcccgagcttaagactggccgtcgttttacaacacagaaagagtttgtagaaacgcaaaaaggccatccgtcaggggccttctgcttagtttgatgcctggcagttccctactctcgccttccgcttcctcgctcactgactcgctgcgctcggtcgttcggctgcggcgagcggtatcagctcactcaaaggcggtaatacggttatccacagaatcaggggataacgcaggaaagaacatgtgagcaaaaggccagcaaaaggccaggaaccgtaaaaaggccgcgttgctggcgtttttccataggctccgcccccctgacgagcatcacaaaaatcgacgctcaagtcagaggtggcgaaacccgacaggactataaagataccaggcgtttccccctggaagctccctcgtgcgctctcctgttccgaccctgccgcttaccggatacctgtccgcctttctcccttcgggaagcgtggcgctttctcatagctcacgctgtaggtatctcagttcggtgtaggtcgttcgctccaagctgggctgtgtgcacgaaccccccgttcagcccgaccgctgcgccttatccggtaactatcgtcttgagtccaacccggtaagacacgacttatcgccactggcagcagccactggtaacaggattagcagagcgaggtatgtaggcggtgctacagagttcttgaagtggtgggctaactacggctacactagaagaacagtatttggtatctgcgctctgctgaagccagttaccttcggaaaaagagttggtagctcttgatccggcaaacaaaccaccgctggtagcggtggtttttttgtttgcaagcagcagattacgcgcagaaaaaaaggatctcaagaagatcctttgatcttttctacggggtctgacgctcagtggaacgacgcgcgcgtaactcacgttaagggattttggtcatgagcttgcgccgtcccgtcaagtcagcgtaatgctctgcttt

SEQ ID NO: 21 - DNA, 11105 bp, Artificial Sequence
  Plasmid pGV1836
tagaaaaactcatcgagcatcaaatgaaactgcaatttattcatatcaggattatcaataccatatttttgaaaaagccgtttctgtaatgaaggagaaaactcaccgaggcagttccataggatggcaagatcctggtatcggtctgcgattccgactcgtccaacatcaatacaacctattaatttcccctcgtcaaaaataaggttatcaagtgagaaatcaccatgagtgacgactgaatccggtgagaatggcaaaagtttatgcatttctttccagacttgttcaacaggccagccattacgctcgtcatcaaaatcactcgcatcaaccaaaccgttattcattcgtgattgcgcctgagcgaggcgaaatacgcgatcgctgttaaaaggacaattacaaacaggaatcgagtgcaaccggcgcaggaacactgccagcgcatcaacaatattttcacctgaatcaggatattcttctaatacctggaacgctgtttttccggggatcgcagtggtgagtaaccatgcatcatcaggagtacggataaaatgcttgatggtcggaagtggcataaattccgtcagccagtttagtctgaccatctcatctgtaacatcattggcaacgctacctttgccatgtttcagaaacaactctggcgcatcgggcttcccatacaagcgatagattgtcgcacctgattgcccgacattatcgcgagcccatttatacccatataaatcagcatccatgttggaatttaatcgcggcctcgacgtttcccgttgaatatggctcatattcttcctttttcaatattattgaagcatttatcagggttattgtctcatgagcggatacatatttgaatgtatttagaaaaataaacaaataggggtcagtgttacaaccaattaaccaattctgaacattatcgcgagcccatttatacctgaatatggctcataacaccccttgtttgcctggcggcagtagcgcggtggtcccacctgaccccatgccgaactcagaagtgaaacgccgtagcgccgatggtagtgtggggactccccatgcgagagtagggaactgccaggcatcaaataaaacgaaaggctcagtcgaaagactgggcctttcgcccgggctaattagggggtgtcgcccttattcgactctatagtgaagttcctattctctagaaagtataggaacttctgaagtggggagatctcaccagtaaaacatacgcatacacatacacacatagagcaagcaagcaggctagcaaccaggaaaggctgccagtgactgctactgggtgtctaagaaccgtagggcggattattgttgcggtggttggttgcgggtggttatgcgatggtacggtgcagaatcgtacggtgttggttatggaattagtatgggtatgtgatatgtggtaatatgtgatattgggttattgtgatttggaatactgaatatcgaatatgggatatggaatatggccatggcatggtatggtatgggatgggagtattctattttattttattttattctggttcctgcgtttagggtagggtaggaagaaggtgagtgcttttgtatataagtggagtgtctggatcagttttgtggattgtgaatgttagtttcccctttaatgtatatttgtattatttgcttttgagtactcaataaccaagcacaactactagttttaaaggatccatcctcttaaacagtacaaatcgcaaagaaaagctccacacccaaaccaaataattgcagtcgagatgctttcactacgtcaatctataagatttttcaagccagccacaagaactttgtgtagctctagatatctgcttatgttgactaaagctacaaaagagcagaaatcattggtgaaaaataggggtgcagaacttgttgtggactgtttggtagaacagggcgtaacacatgtttttggtatcccaggtgcaaaaatcgacgccgtgtttgatgcattacaagacaagggtccagaaattattgttgctagacatgagcaaaatgccgcatttatggcgcaagctgtaggtaggcttacaggtaaacctggtgttgtcctagttacgtctggcccaggagcctccaatttagcaactggtctattgacagctaatactgagggagatcctgtagttgcgttagccggtaatgtaattagagctgataggcttaagagaactcaccagtctctagacaacgctgctttattccaaccgatcaccaagtactcagtagaggtacaagacgtaaagaatatacctgaagctgtgacaaacgcatttcgtatagcttctgctggtcaggctggtgccgcgtttgtttcttttcctcaagacgttgtcaatgaagtgaccaatactaaaaacgttagagcggttgcagcccctaaactaggtccagccgcagacgacgcaattagcgctgcaattgctaaaattcagacggcgaaactaccagtagtccttgtcggtatgaagggcggaagaccagaagcaataaaagctgttcgtaagttattgaagaaagtccaattacctttcgttgagacttaccaagcagcaggtactttatctagagatttagaggatcagtattttggaaggataggtctatttagaaaccaaccaggagatttactattagaacaagctgatgttgtacttactatcggttatgatcctatagagtatgacccaaagttttggaacataaatggggatagaacaattatacatctagacgagataatcgccgacatcgatcacgcttatcaaccagatttagaactaatcggagatatcccgtcaacaatcaatcatattgaacatgatgctgtaaaggttgagttcgctgaacgtgagcagaaaatcttatctgatctaaagcaatatatgcatgagggtgaacaagttccagcagactggaaatctgaccgtgcacatcctttggaaatcgttaaggaactaagaaatgcggtcgatgatcatgtgactgttacatgtgatatcggttcacatgcaatttggatgtcacgttattttaggagctacgaaccattaactttaatgatatctaacgggatgcaaactctgggggttgcacttccttgggctattggcgctagtttagttaagcccggtgagaaggtggtatcggtatcaggtgatggtggctttctgttttcggctatggaattagaaactgcagtccgtttaaaagctcccattgtgcatattgtctggaatgattctacttacgacatggttgcttttcaacagttgaagaaatacaatagaacttcggctgtagactttggtaacatcgatattgtgaaatatgctgagtcttttggcgcaacaggcctgagggtggaaagtccagatcagttagctgatgtgttgagacaagggatgaatgccgagggaccggtaatcatagatgtgccagttgactactcagacaatattaatttggcttctgataaacttcctaaagagtttggcgagctaatgaagaccaaagccttataaggatccataaaaaacacgctttttcagttcgagtttatcattatcaatactgccatttcaaagaatacgtaaataattaatagtagtgattttcctaactttatttagtcaaaaaattagccttttaattctgctgtaacccgtacatgcccaaaatagggggcgggttacacagaatatataacatcgtaggtgtctgggtgaacagtttattcctggcatccactaaatataatggagcccgctttttaagctggcatccagaaaaaaaaagaatcccagcaccaaaatattgttttcttcaccaaccatcagttcataggtccattctcttagcgcaactacagagaacaggggcacaaacaggcaaaaaacgggcacaacctcaatggagtgatgcaacctgcctggagtaaatgatgacacaaggcaattgacccacgcatgtatctatctcattttcttacaccttctattaccttctgctctctctgatttggaaaaagctgaaaaaaaaggttgaaaccagttccctgaaattattcccctacttgactaataagtatataaagacggtaggtattgattgtaattctgtaaatctatttcttaaacttcttaaattctacttttatagttagtcttttttttagttttaaaacaccaagaacttagtttcgaataaacacacataaacaaacaaaaagcttatggcacctgttacaattgaaaagttcgtaaatcaagaagaacgacaccttgtttccaaccgatcagcaacaattccgtttggtgaatacatatttaaaagattgttgtccatcgatacgaaatcagttttcggtgttcctggtgacttcaacttatctctattagaatatctctattcacctagtgttgaatcagctggcctaagatgggtcggcacgtgtaatgaactgaacgccgcttatgcggccgacggatattcccgttactctaataagattggctgtttaataaccacgtatggcgttggtgaattaagcgccttgaacggtatagccggttcgttcgctgaaaatgtcaaagttttgcacattgttggtgtggccaagtccatagattcgcgttcaagtaactttagtgatcggaacctacatcatttggtcccacagctacatgattcaaattttaaagggccaaatcataaagtatatcatgatatggtaaaagatagagtcgcttgctcggtagcctacttggaggatattgaaactgcatgtgaccaagtcgataatgttatccgcgatatttacaagtattctaaacctggttatatttttgttcctgcagattttgcggatatgtctgttacatgtgataatttggttaatgttccacgtatatctcaacaagattgtatagtatacccttctgaaaaccaattgtctgacataatcaacaagattactagttggatatattccagtaaaacacctgcgatccttggagacgtactgactgataggtatggtgtgagtaactttttgaacaagcttatctgcaaaactgggatttggaatttttccactgttatgggaaaatctgtaattgatgagtcaaacccaacttatatgggtcaatataatggtaaagaaggtttaaaacaagtctatgaacattttgaactgtgcgacttggtcttgcattttggagtcgacatcaatgaaattaataatgggcattatacttttacttataaaccaaatgctaaaatcattcaatttcatccgaattatattcgccttgtggacactaggcagggcaatgagcaaatgttcaaaggaatcaattttgcccctattttaaaagaactatacaagcgcattgacgtttctaaactttctttgcaatatgattcaaatgtaactcaatatacgaacgaaacaatgcggttagaagatcctaccaatggacaatcaagcattattacacaagttcacttacaaaagacgatgcctaaatttttgaaccctggtgatgttgtcgtttgtgaaacaggctcttttcaattctctgttcgtgatttcgcgtttccttcgcaattaaaatatatatcgcaaggatttttcctttccattggcatggcccttcctgccgccctaggtgttggaattgccatgcaagaccactcaaacgctcacatcaatggtggcaacgtaaaagaggactataagccaagattaattttgtttgaaggtgacggtgcagcacagatgacaatccaagaactgagcaccattctgaagtgcaatattccactagaagttatcatttggaacaataacggctacactattgaaagagccatcatgggccctaccaggtcgtataacgacgttatgtcttggaaatggaccaaactatttgaagcattcggagacttcgacggaaagtatactaatagcactctcattcaatgtccctctaaattagcactgaaattggaggagcttaagaattcaaacaaaagaagcgggatagaacttttagaagtcaaattaggcgaattggatttccccgaacagctaaagtgcatggttgaagcagcggcacttaaaagaaataaaaaagtgacacatggttataatgtgcagcgatacaatcagttacgtaaaaattttggattttatagagcatattcttcactaagaggttgtaagagcgttttcagacgtatataggctaggtcatgtaattagttatgtcacgcttacattcacgccctccccccacatccgctctaaccgaaaaggaaggagttagacaacctgaagtctaggtccctatttatttttttatagttatgttagtattaagaacgttatttatatttcaaatttttcttttttttctgtacagacgcgtgtacgcatgtaacattatactgaaaaccttgcttgagaaggttttgggacgctcgaaggctttaatttgcgggtgtacaatatggacttcctcttttctggcaaccaaacccatacatcgggattcctataataccttcgttggtctccctaacatgtaggtggcggaggggagatatacaatagaacagataccagacaagacataatgggctaaacaagactacaccaattacactgcctcattgatggtggtacataacgaactaatactgtagccctagacttgatagccatcatcatatcgaagtttcactaccctttttccatttgccatctattgaagtaataataggcgcatgcaacttcttttctttttttttcttttctctctcccccgttgttgtctcaccatatccgcaatgacaaaaaaatgatggaagacactaaaggaaaaaattaacgacaaagacagcaccaacagatgtcgttgttccagagctgatgaggggtatctcgaagcacacgaaactttttccttccttcattcacgcacactactctctaatgagcaacggtatacggccttccttccagttacttgaatttgaaataaaaaaaagtttgctgtcttgctatcaagtataaatagacctgcaattattaatcttttgtttcctcgtcattgttctcgttccctttcttccttgtttctttttctgcacaatatttcaagctataccaagcatacaatcaactatctcatatacacatatgttatatccagagaaattccaaggcattggtatctccaacgcaaaggattggaagcatcctaaacttgttagtttcgaccccaaacctttcggtgaccatgacgttgatgttgagattgaagcatgtggaatatgtgggagcgattttcatattgcagtaggcaattggggccctgttccggaaaatcaaattttgggtcacgaaattattggtagggtagtgaaggtgggttcaaaatgtcacacgggtgttaagattggtgatagggttggtgtaggtgcccaagcattggcttgtttcgaatgcgaaagatgcaaaagtgataacgaacaatactgtaccaacgatcatgttctaacaatgtggactccttacaaagatggatacatatctcaaggtggatttgcatcacatgttagattgcatgagcattttgcaattcaaattccggagaatatcccatcacctttggctgcaccattattgtgtgggggaataacagtgtttagtcctttattgagaaacggttgtggacctggtaagcgtgtggggattgttggcataggtggtattggtcacatggggatattactagctaaggccatgggagccgaagtttatgcgttcagtagaggacactccaagcgtgaagacagtatgaagttaggggcggaccattatattgccatgttggaggataaaggctggaccgaacaatattcaaatgctcttgatctgttagttgtgtgtagttcttctcttagtaaagttaattttgactcgattgtgaaaataatgaagattggcggctccattgtttccattgctgctccagaagttaacgagaagctggtactaaaaccactgggtctgatgggggtatctatctcatcttctgctatcggttcaagaaaagaaatagaacagctattaaagctagtcagcgagaaaaatgtgaagatttgggtagagaagctacccataagcgaggagggtgtatctcacgcatttacgagaatggaatccggagatgttaagtacaggtttacacttgtagactatgacaagaaattccataagtgagcggccgcataacaatactgacagtactaaataattgcctacttggcttcacatacgttgcatacgtcgatatagataataatgataatgacagcaggattatcgtaatacgtaatagttgaaaatctcaaaaatgtgtgggtcattacgtaaataatgataggaatgggattcttctatttttcctttttccattctagcagccgtcgggaaaacgtggcatcctctctttcgggctcaattggagtcacgctgccgtgagcatcctctctttccatatctaacaactgagcacgtaaccaatggaaaagcatgagcttagcgttgctccaaaaaagtattggatggttaataccatttgtctgttctcttctgactttgactcctcaaaaaaaaaaaatctacaatcaacagatcgcttcaattacgccctcacaaaaacttttttccttcttcttcgcccacgttaaattttatccctcatgttgtctaacggatttctgcacttgatttattataaaaagacaaagacataatacttctctatcaatttcagttattgttcttccttgcgttattcttctgttcttctttttcttttgtcatatataaccataaccaagtaatacatattcaaactcgagatgtccaaagctacttataaagaaagggctgcaacccatccatccccagtggcagctaaactgtttaacataatgcacgaaaaacaaactaacttatgcgcatcattagatgtaagaactactaaagagctactggagttggttgaggctttaggtccaaaaatttgtttgttgaagacacatgttgacatattaacagatttttctatggagggtaccgttaagcctctgaaagcgttaagcgcgaaatataactttcttttatttgaagaccgtaagtttgctgatattggaaatactgttaagttgcaatatagcgcaggagtttatagaattgccgaatgggctgacattacgaatgcccacggtgttgtaggtcctggcattgtgtctggattgaaacaagcggcagaggaagtgactaaggaaccaagaggtttactaatgctggcggaattatcttgcaaaggctctctagccaccggtgaatatacaaaaggtactgtggatattgcaaagtctgataaggacttcgtaatcggttttattgcacaaagagatatgggaggtcgtgagaattcaaaatgaagtgaagttcctatactttctagagaataggaacttctatagtgagtcgaataagggcgacacaaaatttattctaaatgcataataaatactgataacatcttatagtttgtattatattttgtattatcgttgacatgtataattttgatatcaaaaactgattttccctttattattttcgagatttattttcttaattctctttaacaaactagaaatattgtatatacaaaaaatcataaataatagatgaatagtttaattataggtgttcatcaatcgaaaaagcaacgtatcttatttaaagtgcgttgcttttttctcatttataaggttaaataattctcatatatcaagcaaagtgacaggcgcccttaaatattctgacaaatgctctttccctaaactccccccataaaaaaacccgccgaagcgggtttttacgttatttgcggattaacgattactcgttatcagaaccgcccagggggcccgagcttaagactggccgtcgttttacaacacagaaagagtttgtagaaacgcaaaaaggccatccgtcaggggccttctgcttagtttgatgcctggcagttccctactctcgccttccgcttcctcgctcactgactcgctgcgctcggtcgttcggctgcggcgagcggtatcagctcactcaaaggcggtaatacggttatccacagaatcaggggataacgcaggaaagaacatgtgagcaaaaggccagcaaaaggccaggaaccgtaaaaaggccgcgttgctggcgtttttccataggctccgcccccctgacgagcatcacaaaaatcgacgctcaagtcagaggtggcgaaacccgacaggactataaagataccaggcgtttccccctggaagctccctcgtgcgctctcctgttccgaccctgccgcttaccggatacctgtccgcctttctcccttcgggaagcgtggcgctttctcatagctcacgctgtaggtatctcagttcggtgtaggtcgttcgctccaagctgggctgtgtgcacgaaccccccgttcagcccgaccgctgcgccttatccggtaactatcgtcttgagtccaacccggtaagacacgacttatcgccactggcagcagccactggtaacaggattagcagagcgaggtatgtaggcggtgctacagagttcttgaagtggtgggctaactacggctacactagaagaacagtatttggtatctgcgctctgctgaagccagttaccttcggaaaaagagttggtagctcttgatccggcaaacaaaccaccgctggtagcggtggtttttttgtttgcaagcagcagattacgcgcagaaaaaaaggatctcaagaagatcctttgatcttttctacggggtctgacgctcagtggaacgacgcgcgcgtaactcacgttaagggattttggtcatgagcttgcgccgtcccgtcaagtcagcgtaatgctctgcttt

SEQ ID NO: 22 - DNA, 11123 bp, Artificial Sequence
  Plasmid pGV1837
tagaaaaactcatcgagcatcaaatgaaactgcaatttattcatatcaggattatcaataccatatttttgaaaaagccgtttctgtaatgaaggagaaaactcaccgaggcagttccataggatggcaagatcctggtatcggtctgcgattccgactcgtccaacatcaatacaacctattaatttcccctcgtcaaaaataaggttatcaagtgagaaatcaccatgagtgacgactgaatccggtgagaatggcaaaagtttatgcatttctttccagacttgttcaacaggccagccattacgctcgtcatcaaaatcactcgcatcaaccaaaccgttattcattcgtgattgcgcctgagcgaggcgaaatacgcgatcgctgttaaaaggacaattacaaacaggaatcgagtgcaaccggcgcaggaacactgccagcgcatcaacaatattttcacctgaatcaggatattcttctaatacctggaacgctgtttttccggggatcgcagtggtgagtaaccatgcatcatcaggagtacggataaaatgcttgatggtcggaagtggcataaattccgtcagccagtttagtctgaccatctcatctgtaacatcattggcaacgctacctttgccatgtttcagaaacaactctggcgcatcgggcttcccatacaagcgatagattgtcgcacctgattgcccgacattatcgcgagcccatttatacccatataaatcagcatccatgttggaatttaatcgcggcctcgacgtttcccgttgaatatggctcatattcttcctttttcaatattattgaagcatttatcagggttattgtctcatgagcggatacatatttgaatgtatttagaaaaataaacaaataggggtcagtgttacaaccaattaaccaattctgaacattatcgcgagcccatttatacctgaatatggctcataacaccccttgtttgcctggcggcagtagcgcggtggtcccacctgaccccatgccgaactcagaagtgaaacgccgtagcgccgatggtagtgtggggactccccatgcgagagtagggaactgccaggcatcaaataaaacgaaaggctcagtcgaaagactgggcctttcgcccgggctaattagggggtgtcgcccttattcgactctatagtgaagttcctattctctagaaagtataggaacttctgaagtggggagatctcaccagtaaaacatacgcatacacatacacacatagagcaagcaagcaggctagcaaccaggaaaggctgccagtgactgctactgggtgtctaagaaccgtagggcggattattgttgcggtggttggttgcgggtggttatgcgatggtacggtgcagaatcgtacggtgttggttatggaattagtatgggtatgtgatatgtggtaatatgtgatattgggttattgtgatttggaatactgaatatcgaatatgggatatggaatatggccatggcatggtatggtatgggatgggagtattctattttattttattttattctggttcctgcgtttagggtagggtaggaagaaggtgagtgcttttgtatataagtggagtgtctggatcagttttgtggattgtgaatgttagtttcccctttaatgtatatttgtattatttgcttttgagtactcaataaccaagcacaactactagttttaaaggatccatcctcttaaacagtacaaatcgcaaagaaaagctccacacccaaaccaaataattgcagtcgagatgctttcactacgtcaatctataagatttttcaagccagccacaagaactttgtgtagctctagatatctgcttcagcaaaaacccgtggtgatgttgactaaagctacaaaagagcagaaatcattggtgaaaaataggggtgcagaacttgttgtggactgtttggtagaacagggcgtaacacatgtttttggtatcccaggtgcaaaaatcgacgccgtgtttgatgcattacaagacaagggtccagaaattattgttgctagacatgagcaaaatgccgcatttatggcgcaagctgtaggtaggcttacaggtaaacctggtgttgtcctagttacgtctggcccaggagcctccaatttagcaactggtctattgacagctaatactgagggagatcctgtagttgcgttagccggtaatgtaattagagctgataggcttaagagaactcaccagtctctagacaacgctgctttattccaaccgatcaccaagtactcagtagaggtacaagacgtaaagaatatacctgaagctgtgacaaacgcatttcgtatagcttctgctggtcaggctggtgccgcgtttgtttcttttcctcaagacgttgtcaatgaagtgaccaatactaaaaacgttagagcggttgcagcccctaaactaggtccagccgcagacgacgcaattagcgctgcaattgctaaaattcagacggcgaaactaccagtagtccttgtcggtatgaagggcggaagaccagaagcaataaaagctgttcgtaagttattgaagaaagtccaattacctttcgttgagacttaccaagcagcaggtactttatctagagatttagaggatcagtattttggaaggataggtctatttagaaaccaaccaggagatttactattagaacaagctgatgttgtacttactatcggttatgatcctatagagtatgacccaaagttttggaacataaatggggatagaacaattatacatctagacgagataatcgccgacatcgatcacgcttatcaaccagatttagaactaatcggagatatcccgtcaacaatcaatcatattgaacatgatgctgtaaaggttgagttcgctgaacgtgagcagaaaatcttatctgatctaaagcaatatatgcatgagggtgaacaagttccagcagactggaaatctgaccgtgcacatcctttggaaatcgttaaggaactaagaaatgcggtcgatgatcatgtgactgttacatgtgatatcggttcacatgcaatttggatgtcacgttattttaggagctacgaaccattaactttaatgatatctaacgggatgcaaactctgggggttgcacttccttgggctattggcgctagtttagttaagcccggtgagaaggtggtatcggtatcaggtgatggtggctttctgttttcggctatggaattagaaactgcagtccgtttaaaagctcccattgtgcatattgtctggaatgattctacttacgacatggttgcttttcaacagttgaagaaatacaatagaacttcggctgtagactttggtaacatcgatattgtgaaatatgctgagtcttttggcgcaacaggcctgagggtggaaagtccagatcagttagctgatgtgttgagacaagggatgaatgccgagggaccggtaatcatagatgtgccagttgactactcagacaatattaatttggcttctgataaacttcctaaagagtttggcgagctaatgaagaccaaagccttataaggatccataaaaaacacgctttttcagttcgagtttatcattatcaatactgccatttcaaagaatacgtaaataattaatagtagtgattttcctaactttatttagtcaaaaaattagccttttaattctgctgtaacccgtacatgcccaaaatagggggcgggttacacagaatatataacatcgtaggtgtctgggtgaacagtttattcctggcatccactaaatataatggagcccgctttttaagctggcatccagaaaaaaaaagaatcccagcaccaaaatattgttttcttcaccaaccatcagttcataggtccattctcttagcgcaactacagagaacaggggcacaaacaggcaaaaaacgggcacaacctcaatggagtgatgcaacctgcctggagtaaatgatgacacaaggcaattgacccacgcatgtatctatctcattttcttacaccttctattaccttctgctctctctgatttggaaaaagctgaaaaaaaaggttgaaaccagttccctgaaattattcccctacttgactaataagtatataaagacggtaggtattgattgtaattctgtaaatctatttcttaaacttcttaaattctacttttatagttagtcttttttttagttttaaaacaccaagaacttagtttcgaataaacacacataaacaaacaaaaagcttatggcacctgttacaattgaaaagttcgtaaatcaagaagaacgacaccttgtttccaaccgatcagcaacaattccgtttggtgaatacatatttaaaagattgttgtccatcgatacgaaatcagttttcggtgttcctggtgacttcaacttatctctattagaatatctctattcacctagtgttgaatcagctggcctaagatgggtcggcacgtgtaatgaactgaacgccgcttatgcggccgacggatattcccgttactctaataagattggctgtttaataaccacgtatggcgttggtgaattaagcgccttgaacggtatagccggttcgttcgctgaaaatgtcaaagttttgcacattgttggtgtggccaagtccatagattcgcgttcaagtaactttagtgatcggaacctacatcatttggtcccacagctacatgattcaaattttaaagggccaaatcataaagtatatcatgatatggtaaaagatagagtcgcttgctcggtagcctacttggaggatattgaaactgcatgtgaccaagtcgataatgttatccgcgatatttacaagtattctaaacctggttatatttttgttcctgcagattttgcggatatgtctgttacatgtgataatttggttaatgttccacgtatatctcaacaagattgtatagtatacccttctgaaaaccaattgtctgacataatcaacaagattactagttggatatattccagtaaaacacctgcgatccttggagacgtactgactgataggtatggtgtgagtaactttttgaacaagcttatctgcaaaactgggatttggaatttttccactgttatgggaaaatctgtaattgatgagtcaaacccaacttatatgggtcaatataatggtaaagaaggtttaaaacaagtctatgaacattttgaactgtgcgacttggtcttgcattttggagtcgacatcaatgaaattaataatgggcattatacttttacttataaaccaaatgctaaaatcattcaatttcatccgaattatattcgccttgtggacactaggcagggcaatgagcaaatgttcaaaggaatcaattttgcccctattttaaaagaactatacaagcgcattgacgtttctaaactttctttgcaatatgattcaaatgtaactcaatatacgaacgaaacaatgcggttagaagatcctaccaatggacaatcaagcattattacacaagttcacttacaaaagacgatgcctaaatttttgaaccctggtgatgttgtcgtttgtgaaacaggctcttttcaattctctgttcgtgatttcgcgtttccttcgcaattaaaatatatatcgcaaggatttttcctttccattggcatggcccttcctgccgccctaggtgttggaattgccatgcaagaccactcaaacgctcacatcaatggtggcaacgtaaaagaggactataagccaagattaattttgtttgaaggtgacggtgcagcacagatgacaatccaagaactgagcaccattctgaagtgcaatattccactagaagttatcatttggaacaataacggctacactattgaaagagccatcatgggccctaccaggtcgtataacgacgttatgtcttggaaatggaccaaactatttgaagcattcggagacttcgacggaaagtatactaatagcactctcattcaatgtccctctaaattagcactgaaattggaggagcttaagaattcaaacaaaagaagcgggatagaacttttagaagtcaaattaggcgaattggatttccccgaacagctaaagtgcatggttgaagcagcggcacttaaaagaaataaaaaagtgacacatggttataatgtgcagcgatacaatcagttacgtaaaaattttggattttatagagcatattcttcactaagaggttgtaagagcgttttcagacgtatataggctaggtcatgtaattagttatgtcacgcttacattcacgccctccccccacatccgctctaaccgaaaaggaaggagttagacaacctgaagtctaggtccctatttatttttttatagttatgttagtattaagaacgttatttatatttcaaatttttcttttttttctgtacagacgcgtgtacgcatgtaacattatactgaaaaccttgcttgagaaggttttgggacgctcgaaggctttaatttgcgggtgtacaatatggacttcctcttttctggcaaccaaacccatacatcgggattcctataataccttcgttggtctccctaacatgtaggtggcggaggggagatatacaatagaacagataccagacaagacataatgggctaaacaagactacaccaattacactgcctcattgatggtggtacataacgaactaatactgtagccctagacttgatagccatcatcatatcgaagtttcactaccctttttccatttgccatctattgaagtaataataggcgcatgcaacttcttttctttttttttcttttctctctcccccgttgttgtctcaccatatccgcaatgacaaaaaaatgatggaagacactaaaggaaaaaattaacgacaaagacagcaccaacagatgtcgttgttccagagctgatgaggggtatctcgaagcacacgaaactttttccttccttcattcacgcacactactctctaatgagcaacggtatacggccttccttccagttacttgaatttgaaataaaaaaaagtttgctgtcttgctatcaagtataaatagacctgcaattattaatcttttgtttcctcgtcattgttctcgttccctttcttccttgtttctttttctgcacaatatttcaagctataccaagcatacaatcaactatctcatatacacatatgttatatccagagaaattccaaggcattggtatctccaacgcaaaggattggaagcatcctaaacttgttagtttcgaccccaaacctttcggtgaccatgacgttgatgttgagattgaagcatgtggaatatgtgggagcgattttcatattgcagtaggcaattggggccctgttccggaaaatcaaattttgggtcacgaaattattggtagggtagtgaaggtgggttcaaaatgtcacacgggtgttaagattggtgatagggttggtgtaggtgcccaagcattggcttgtttcgaatgcgaaagatgcaaaagtgataacgaacaatactgtaccaacgatcatgttctaacaatgtggactccttacaaagatggatacatatctcaaggtggatttgcatcacatgttagattgcatgagcattttgcaattcaaattccggagaatatcccatcacctttggctgcaccattattgtgtgggggaataacagtgtttagtcctttattgagaaacggttgtggacctggtaagcgtgtggggattgttggcataggtggtattggtcacatggggatattactagctaaggccatgggagccgaagtttatgcgttcagtagaggacactccaagcgtgaagacagtatgaagttaggggcggaccattatattgccatgttggaggataaaggctggaccgaacaatattcaaatgctcttgatctgttagttgtgtgtagttcttctcttagtaaagttaattttgactcgattgtgaaaataatgaagattggcggctccattgtttccattgctgctccagaagttaacgagaagctggtactaaaaccactgggtctgatgggggtatctatctcatcttctgctatcggttcaagaaaagaaatagaacagctattaaagctagtcagcgagaaaaatgtgaagatttgggtagagaagctacccataagcgaggagggtgtatctcacgcatttacgagaatggaatccggagatgttaagtacaggtttacacttgtagactatgacaagaaattccataagtgagcggccgcataacaatactgacagtactaaataattgcctacttggcttcacatacgttgcatacgtcgatatagataataatgataatgacagcaggattatcgtaatacgtaatagttgaaaatctcaaaaatgtgtgggtcattacgtaaataatgataggaatgggattcttctatttttcctttttccattctagcagccgtcgggaaaacgtggcatcctctctttcgggctcaattggagtcacgctgccgtgagcatcctctctttccatatctaacaactgagcacgtaaccaatggaaaagcatgagcttagcgttgctccaaaaaagtattggatggttaataccatttgtctgttctcttctgactttgactcctcaaaaaaaaaaaatctacaatcaacagatcgcttcaattacgccctcacaaaaacttttttccttcttcttcgcccacgttaaattttatccctcatgttgtctaacggatttctgcacttgatttattataaaaagacaaagacataatacttctctatcaatttcagttattgttcttccttgcgttattcttctgttcttctttttcttttgtcatatataaccataaccaagtaatacatattcaaactcgagatgtccaaagctacttataaagaaagggctgcaacccatccatccccagtggcagctaaactgtttaacataatgcacgaaaaacaaactaacttatgcgcatcattagatgtaagaactactaaagagctactggagttggttgaggctttaggtccaaaaatttgtttgttgaagacacatgttgacatattaacagatttttctatggagggtaccgttaagcctctgaaagcgttaagcgcgaaatataactttcttttatttgaagaccgtaagtttgctgatattggaaatactgttaagttgcaatatagcgcaggagtttatagaattgccgaatgggctgacattacgaatgcccacggtgttgtaggtcctggcattgtgtctggattgaaacaagcggcagaggaagtgactaaggaaccaagaggtttactaatgctggcggaattatcttgcaaaggctctctagccaccggtgaatatacaaaaggtactgtggatattgcaaagtctgataaggacttcgtaatcggttttattgcacaaagagatatgggaggtcgtgagaattcaaaatgaagtgaagttcctatactttctagagaataggaacttctatagtgagtcgaataagggcgacacaaaatttattctaaatgcataataaatactgataacatcttatagtttgtattatattttgtattatcgttgacatgtataattttgatatcaaaaactgattttccctttattattttcgagatttattttcttaattctctttaacaaactagaaatattgtatatacaaaaaatcataaataatagatgaatagtttaattataggtgttcatcaatcgaaaaagcaacgtatcttatttaaagtgcgttgcttttttctcatttataaggttaaataattctcatatatcaagcaaagtgacaggcgcccttaaatattctgacaaatgctctttccctaaactccccccataaaaaaacccgccgaagcgggtttttacgttatttgcggattaacgattactcgttatcagaaccgcccagggggcccgagcttaagactggccgtcgttttacaacacagaaagagtttgtagaaacgcaaaaaggccatccgtcaggggccttctgcttagtttgatgcctggcagttccctactctcgccttccgcttcctcgctcactgactcgctgcgctcggtcgttcggctgcggcgagcggtatcagctcactcaaaggcggtaatacggttatccacagaatcaggggataacgcaggaaagaacatgtgagcaaaaggccagcaaaaggccaggaaccgtaaaaaggccgcgttgctggcgtttttccataggctccgcccccctgacgagcatcacaaaaatcgacgctcaagtcagaggtggcgaaacccgacaggactataaagataccaggcgtttccccctggaagctccctcgtgcgctctcctgttccgaccctgccgcttaccggatacctgtccgcctttctcccttcgggaagcgtggcgctttctcatagctcacgctgtaggtatctcagttcggtgtaggtcgttcgctccaagctgggctgtgtgcacgaaccccccgttcagcccgaccgctgcgccttatccggtaactatcgtcttgagtccaacccggtaagacacgacttatcgccactggcagcagccactggtaacaggattagcagagcgaggtatgtaggcggtgctacagagttcttgaagtggtgggctaactacggctacactagaagaacagtatttggtatctgcgctctgctgaagccagttaccttcggaaaaagagttggtagctcttgatccggcaaacaaaccaccgctggtagcggtggtttttttgtttgcaagcagcagattacgcgcagaaaaaaaggatctcaagaagatcctttgatcttttctacggggtctgacgctcagtggaacgacgcgcgcgtaactcacgttaagggattttggtcatgagcttgcgccgtcccgtcaagtcagcgtaatgctctgcttt

SEQ ID NO: 23 - DNA, 11117 bp, Artificial Sequence
  Plasmid pGV1838
tagaaaaactcatcgagcatcaaatgaaactgcaatttattcatatcaggattatcaataccatatttttgaaaaagccgtttctgtaatgaaggagaaaactcaccgaggcagttccataggatggcaagatcctggtatcggtctgcgattccgactcgtccaacatcaatacaacctattaatttcccctcgtcaaaaataaggttatcaagtgagaaatcaccatgagtgacgactgaatccggtgagaatggcaaaagtttatgcatttctttccagacttgttcaacaggccagccattacgctcgtcatcaaaatcactcgcatcaaccaaaccgttattcattcgtgattgcgcctgagcgaggcgaaatacgcgatcgctgttaaaaggacaattacaaacaggaatcgagtgcaaccggcgcaggaacactgccagcgcatcaacaatattttcacctgaatcaggatattcttctaatacctggaacgctgtttttccggggatcgcagtggtgagtaaccatgcatcatcaggagtacggataaaatgcttgatggtcggaagtggcataaattccgtcagccagtttagtctgaccatctcatctgtaacatcattggcaacgctacctttgccatgtttcagaaacaactctggcgcatcgggcttcccatacaagcgatagattgtcgcacctgattgcccgacattatcgcgagcccatttatacccatataaatcagcatccatgttggaatttaatcgcggcctcgacgtttcccgttgaatatggctcatattcttcctttttcaatattattgaagcatttatcagggttattgtctcatgagcggatacatatttgaatgtatttagaaaaataaacaaataggggtcagtgttacaaccaattaaccaattctgaacattatcgcgagcccatttatacctgaatatggctcataacaccccttgtttgcctggcggcagtagcgcggtggtcccacctgaccccatgccgaactcagaagtgaaacgccgtagcgccgatggtagtgtggggactccccatgcgagagtagggaactgccaggcatcaaataaaacgaaaggctcagtcgaaagactgggcctttcgcccgggctaattagggggtgtcgcccttattcgactctatagtgaagttcctattctctagaaagtataggaacttctgaagtggggagatctcaccagtaaaacatacgcatacacatacacacatagagcaagcaagcaggctagcaaccaggaaaggctgccagtgactgctactgggtgtctaagaaccgtagggcggattattgttgcggtggttggttgcgggtggttatgcgatggtacggtgcagaatcgtacggtgttggttatggaattagtatgggtatgtgatatgtggtaatatgtgatattgggttattgtgatttggaatactgaatatcgaatatgggatatggaatatggccatggcatggtatggtatgggatgggagtattctattttattttattttattctggttcctgcgtttagggtagggtaggaagaaggtgagtgcttttgtatataagtggagtgtctggatcagttttgtggattgtgaatgttagtttcccctttaatgtatatttgtattatttgcttttgagtactcaataaccaagcacaactactagttttaaaggatccatcctcttaaacagtacaaatcgcaaagaaaagctccacacccaaaccaaataattgcagtcgagatgatcagacaatctacgctaaaaaacttcgctattaagcgttgctttcaacatatagcataccgcaacacacctgccatgagatcagtagctctcgcgcagcgcttttatagttcgtcttcccgttattacagtgcgtctccattaccagcctctaaaaggccagagcctgctccaagtttcaatgttgatccattagaacagcccgctgaaccttcaaaattggctaagaaactacgcgctgagcctgacatggatacctctttcgtcggtttaactggtggtcaaatatttaacgaaatgatgtccagacaaaacgttgatactgtatttggttatccaggtggtgctatcctacctgtttacgatgccattcataacagtgataaattcaacttcgttcttccaaaacacgaacaaggtgccggtcacatggcagaaggctacgccagagcttctggtaaaccaggtgttgtcttggttacttctgggccaggtgccaccaatgtcgttactccaatggcagatgcctttgcagacgggattccaatggttgtctttacagggcaagtcccaactagtgctatcggtactgatgctttccaagaggctgacgtcgttggtatttctagatcttgtacgaaatggaatgtcatggtcaagtccgtggaagaattgccattgcgtattaacgaggcttttgaaattgccacgagcggtagaccgggaccagtcttggtcgatttaccaaaggatgttacagcagctatcttaagaaatccaattccaacaaaaacaactcttccatcaaacgcactaaaccaattaaccagtcgcgcacaagatgaatttgtcatgcaaagtatcaataaagcagcagatttgatcaacttggcaaagaaacctgtcttatacgtcggtgctggtattttaaaccatgcagatggtccaagattactaaaagaattaagtgaccgtgctcaaatacctgtcaccactactttacaaggtttaggttcattcgaccaagaagatccaaaatcattggatatgcttggtatgcacggttgtgctactgccaacctggcagtgcaaaatgccgacttgataattgcagttggtgctagattcgacgaccgtgtcactggtaatatttctaaattcgctccagaagctcgtcgtgcagctgccgagggtagaggtggtattattcatttcgaggttagtccaaaaaacataaacaaggttgttcaaactcaaatagcagtggaaggtgatgctacgaccaatctgggcaaaatgatgtcaaagattttcccagttaaggagaggtctgaatggtttgctcaaataaataaatggaagaaggaatacccatacgcttatatggaggagactccaggatctaaaattaaaccacagacggttataaagaaactatccaaggttgccaacgacacaggaagacatgtcattgttacaacgggtgtggggcaacatcaaatgtgggctgctcaacactggacatggagaaatccacatactttcatcacatcaggtggtttaggtacgatgggttacggtctccctgccgccatcggtgctcaagttgcaaagccagaatctttggttattgacattgatggtgacgcatcctttaacatgactctaacggaattgagttctgccgttcaagctggtactccagtgaagattttgattttgaacaatgaagagcaaggtatggttactcaatggcaatccctgttctacgaacatcgttattcccacacacatcaattgaaccctgatttcataaaactagcggaggctatgggtttaaaaggtttaagagtcaagaagcaagaggaattggacgctaagttgaaagaattcgtttctaccaagggcccagttttgcttgaagtggaagttgataaaaaagttcctgttttgccaatggtggcaggtggtagcggtctagacgagttcataaattttgacccagaagttgaaagacaacagactgaattacgtcataagcgtacaggcggtaagcactgaggatccataaaaaacacgctttttcagttcgagtttatcattatcaatactgccatttcaaagaatacgtaaataattaatagtagtgattttcctaactttatttagtcaaaaaattagccttttaattctgctgtaacccgtacatgcccaaaatagggggcgggttacacagaatatataacatcgtaggtgtctgggtgaacagtttattcctggcatccactaaatataatggagcccgctttttaagctggcatccagaaaaaaaaagaatcccagcaccaaaatattgttttcttcaccaaccatcagttcataggtccattctcttagcgcaactacagagaacaggggcacaaacaggcaaaaaacgggcacaacctcaatggagtgatgcaacctgcctggagtaaatgatgacacaaggcaattgacccacgcatgtatctatctcattttcttacaccttctattaccttctgctctctctgatttggaaaaagctgaaaaaaaaggttgaaaccagttccctgaaattattcccctacttgactaataagtatataaagacggtaggtattgattgtaattctgtaaatctatttcttaaacttcttaaattctacttttatagttagtcttttttttagttttaaaacaccaagaacttagtttcgaataaacacacataaacaaacaaaaagcttatgtatactgttggagattatttgttagatagattgcatgaactaggcattgaagaaattttcggagttcccggggattacaatctgcaatttctagaccagattatttcacataaagacatgaaatgggtcggaaatgcaaatgagttaaatgcatcttacatggccgatggttatgccagaaccaaaaaggcggctgctttcttgactaccttcggggtgggtgaattatcggcagttaatggcttggctggatcatacgcagaaaacttgcctgtcgttgaaatcgttggctcgccaacatcaaaagttcaaaatgaaggaaaattcgtccaccacactttggcagatggtgacttcaagcacttcatgaaaatgcatgaacctgtaacggctgccagaactctactaactgctgagaatgcaactgtagagattgatcgtgtcttgagcgctcttttaaaggaaagaaagccagtctatattaacctgccagtagacgtcgcagcggccaaagcagagaagcctagcttaccacttaaaaaggaaaatagtacctcaaacacttcagatcaagagattcttaacaagatccaggaatctttgaaaaacgctaaaaagcccattgttataactggccatgagatcatatcatttggtttggagaaaacagtgacccagttcattagtaagacgaaactgccaataaccactctaaatttcggtaagtcctccgttgatgaagcgttgcctagcttcttgggtatttacaacggcaccttgtcagaacccaatctgaaagaatttgttgaatctgcagactttatattgatgttgggagtaaagttgactgacagctctactggtgcttttacacaccatctgaatgaaaacaagatgatatctcttaatatcgatgaaggtaagatattcaatgaaagaatacagaacttcgacttcgagagtctaatttcttccttactggacttaagtgaaatcgagtataaaggtaagtacattgacaaaaagcaggaagattttgttccgagcaacgcgctacttagtcaagatagattatggcaagctgttgaaaatctgacacaatccaatgagacaattgttgccgaacaaggtacctccttttttggcgcttcttccatcttcctaaagtccaagtctcatttcatagggcagccattgtggggtagcatcggttacacctttcctgctgctctagggtcccaaattgctgataaagaaagtagacatttgttgtttataggagacggatctttacaattgacagttcaagagttaggtttagccatcagagagaagattaatcctatctgcttcataataaacaacgatggctatacagttgagagggaaattcatggacctaatcaatcttataatgatataccaatgtggaattatagcaagttacctgaatcttttggggctaccgaggatcgtgttgtttctaagattgtaagaaccgaaaatgaatttgtttctgttatgaaggaagcacaagcggaccctaacaggatgtactggattgagttaattcttgctaaggagggtgcgccaaaggttctaaagaagatgggtaagttgttcgccgaacaaaacaaatccgtgacacatggttataatgtgcagcgatacaatcagttacgtaaaaattttggattttatagagcatattcttcactaagaggttgtaagagcgttttcagacgtatataggctaggtcatgtaattagttatgtcacgcttacattcacgccctccccccacatccgctctaaccgaaaaggaaggagttagacaacctgaagtctaggtccctatttatttttttatagttatgttagtattaagaacgttatttatatttcaaatttttcttttttttctgtacagacgcgtgtacgcatgtaacattatactgaaaaccttgcttgagaaggttttgggacgctcgaaggctttaatttgcgggtgtacaatatggacttcctcttttctggcaaccaaacccatacatcgggattcctataataccttcgttggtctccctaacatgtaggtggcggaggggagatatacaatagaacagataccagacaagacataatgggctaaacaagactacaccaattacactgcctcattgatggtggtacataacgaactaatactgtagccctagacttgatagccatcatcatatcgaagtttcactaccctttttccatttgccatctattgaagtaataataggcgcatgcaacttcttttctttttttttcttttctctctcccccgttgttgtctcaccatatccgcaatgacaaaaaaatgatggaagacactaaaggaaaaaattaacgacaaagacagcaccaacagatgtcgttgttccagagctgatgaggggtatctcgaagcacacgaaactttttccttccttcattcacgcacactactctctaatgagcaacggtatacggccttccttccagttacttgaatttgaaataaaaaaaagtttgctgtcttgctatcaagtataaatagacctgcaattattaatcttttgtttcctcgtcattgttctcgttccctttcttccttgtttctttttctgcacaatatttcaagctataccaagcatacaatcaactatctcatatacacatatgttatatccagagaaattccaaggcattggtatctccaacgcaaaggattggaagcatcctaaacttgttagtttcgaccccaaacctttcggtgaccatgacgttgatgttgagattgaagcatgtggaatatgtgggagcgattttcatattgcagtaggcaattggggccctgttccggaaaatcaaattttgggtcacgaaattattggtagggtagtgaaggtgggttcaaaatgtcacacgggtgttaagattggtgatagggttggtgtaggtgcccaagcattggcttgtttcgaatgcgaaagatgcaaaagtgataacgaacaatactgtaccaacgatcatgttctaacaatgtggactccttacaaagatggatacatatctcaaggtggatttgcatcacatgttagattgcatgagcattttgcaattcaaattccggagaatatcccatcacctttggctgcaccattattgtgtgggggaataacagtgtttagtcctttattgagaaacggttgtggacctggtaagcgtgtggggattgttggcataggtggtattggtcacatggggatattactagctaaggccatgggagccgaagtttatgcgttcagtagaggacactccaagcgtgaagacagtatgaagttaggggcggaccattatattgccatgttggaggataaaggctggaccgaacaatattcaaatgctcttgatctgttagttgtgtgtagttcttctcttagtaaagttaattttgactcgattgtgaaaataatgaagattggcggctccattgtttccattgctgctccagaagttaacgagaagctggtactaaaaccactgggtctgatgggggtatctatctcatcttctgctatcggttcaagaaaagaaatagaacagctattaaagctagtcagcgagaaaaatgtgaagatttgggtagagaagctacccataagcgaggagggtgtatctcacgcatttacgagaatggaatccggagatgttaagtacaggtttacacttgtagactatgacaagaaattccataagtgagcggccgcataacaatactgacagtactaaataattgcctacttggcttcacatacgttgcatacgtcgatatagataataatgataatgacagcaggattatcgtaatacgtaatagttgaaaatctcaaaaatgtgtgggtcattacgtaaataatgataggaatgggattcttctatttttcctttttccattctagcagccgtcgggaaaacgtggcatcctctctttcgggctcaattggagtcacgctgccgtgagcatcctctctttccatatctaacaactgagcacgtaaccaatggaaaagcatgagcttagcgttgctccaaaaaagtattggatggttaataccatttgtctgttctcttctgactttgactcctcaaaaaaaaaaaatctacaatcaacagatcgcttcaattacgccctcacaaaaacttttttccttcttcttcgcccacgttaaattttatccctcatgttgtctaacggatttctgcacttgatttattataaaaagacaaagacataatacttctctatcaatttcagttattgttcttccttgcgttattcttctgttcttctttttcttttgtcatatataaccataaccaagtaatacatattcaaactcgagatgtccaaagctacttataaagaaagggctgcaacccatccatccccagtggcagctaaactgtttaacataatgcacgaaaaacaaactaacttatgcgcatcattagatgtaagaactactaaagagctactggagttggttgaggctttaggtccaaaaatttgtttgttgaagacacatgttgacatattaacagatttttctatggagggtaccgttaagcctctgaaagcgttaagcgcgaaatataactttcttttatttgaagaccgtaagtttgctgatattggaaatactgttaagttgcaatatagcgcaggagtttatagaattgccgaatgggctgacattacgaatgcccacggtgttgtaggtcctggcattgtgtctggattgaaacaagcggcagaggaagtgactaaggaaccaagaggtttactaatgctggcggaattatcttgcaaaggctctctagccaccggtgaatatacaaaaggtactgtggatattgcaaagtctgataaggacttcgtaatcggttttattgcacaaagagatatgggaggtcgtgagaattcaaaatgaagtgaagttcctatactttctagagaataggaacttctatagtgagtcgaataagggcgacacaaaatttattctaaatgcataataaatactgataacatcttatagtttgtattatattttgtattatcgttgacatgtataattttgatatcaaaaactgattttccctttattattttcgagatttattttcttaattctctttaacaaactagaaatattgtatatacaaaaaatcataaataatagatgaatagtttaattataggtgttcatcaatcgaaaaagcaacgtatcttatttaaagtgcgttgcttttttctcatttataaggttaaataattctcatatatcaagcaaagtgacaggcgcccttaaatattctgacaaatgctctttccctaaactccccccataaaaaaacccgccgaagcgggtttttacgttatttgcggattaacgattactcgttatcagaaccgcccagggggcccgagcttaagactggccgtcgttttacaacacagaaagagtttgtagaaacgcaaaaaggccatccgtcaggggccttctgcttagtttgatgcctggcagttccctactctcgccttccgcttcctcgctcactgactcgctgcgctcggtcgttcggctgcggcgagcggtatcagctcactcaaaggcggtaatacggttatccacagaatcaggggataacgcaggaaagaacatgtgagcaaaaggccagcaaaaggccaggaaccgtaaaaaggccgcgttgctggcgtttttccataggctccgcccccctgacgagcatcacaaaaatcgacgctcaagtcagaggtggcgaaacccgacaggactataaagataccaggcgtttccccctggaagctccctcgtgcgctctcctgttccgaccctgccgcttaccggatacctgtccgcctttctcccttcgggaagcgtggcgctttctcatagctcacgctgtaggtatctcagttcggtgtaggtcgttcgctccaagctgggctgtgtgcacgaaccccccgttcagcccgaccgctgcgccttatccggtaactatcgtcttgagtccaacccggtaagacacgacttatcgccactggcagcagccactggtaacaggattagcagagcgaggtatgtaggcggtgctacagagttcttgaagtggtgggctaactacggctacactagaagaacagtatttggtatctgcgctctgctgaagccagttaccttcggaaaaagagttggtagctcttgatccggcaaacaaaccaccgctggtagcggtggtttttttgtttgcaagcagcagattacgcgcagaaaaaaaggatctcaagaagatcctttgatcttttctacggggtctgacgctcagtggaacgacgcgcgcgtaactcacgttaagggattttggtcatgagcttgcgccgtcccgtcaagtcagcgtaatgctctgcttt

SEQ ID NO: 24 - DNA, 11378 bp, Artificial Sequence
  Plasmid pGV1839
tagaaaaactcatcgagcatcaaatgaaactgcaatttattcatatcaggattatcaataccatatttttgaaaaagccgtttctgtaatgaaggagaaaactcaccgaggcagttccataggatggcaagatcctggtatcggtctgcgattccgactcgtccaacatcaatacaacctattaatttcccctcgtcaaaaataaggttatcaagtgagaaatcaccatgagtgacgactgaatccggtgagaatggcaaaagtttatgcatttctttccagacttgttcaacaggccagccattacgctcgtcatcaaaatcactcgcatcaaccaaaccgttattcattcgtgattgcgcctgagcgaggcgaaatacgcgatcgctgttaaaaggacaattacaaacaggaatcgagtgcaaccggcgcaggaacactgccagcgcatcaacaatattttcacctgaatcaggatattcttctaatacctggaacgctgtttttccggggatcgcagtggtgagtaaccatgcatcatcaggagtacggataaaatgcttgatggtcggaagtggcataaattccgtcagccagtttagtctgaccatctcatctgtaacatcattggcaacgctacctttgccatgtttcagaaacaactctggcgcatcgggcttcccatacaagcgatagattgtcgcacctgattgcccgacattatcgcgagcccatttatacccatataaatcagcatccatgttggaatttaatcgcggcctcgacgtttcccgttgaatatggctcatattcttcctttttcaatattattgaagcatttatcagggttattgtctcatgagcggatacatatttgaatgtatttagaaaaataaacaaataggggtcagtgttacaaccaattaaccaattctgaacattatcgcgagcccatttatacctgaatatggctcataacaccccttgtttgcctggcggcagtagcgcggtggtcccacctgaccccatgccgaactcagaagtgaaacgccgtagcgccgatggtagtgtggggactccccatgcgagagtagggaactgccaggcatcaaataaaacgaaaggctcagtcgaaagactgggcctttcgcccgggctaattagggggtgtcgcccttattcgactctatagtgaagttcctattctctagaaagtataggaacttctgaagtggggagatctcaccagtaaaacatacgcatacacatacacacatagagcaagcaagcaggctagcaaccaggaaaggctgccagtgactgctactgggtgtctaagaaccgtagggcggattattgttgcggtggttggttgcgggtggttatgcgatggtacggtgcagaatcgtacggtgttggttatggaattagtatgggtatgtgatatgtggtaatatgtgatattgggttattgtgatttggaatactgaatatcgaatatgggatatggaatatggccatggcatggtatggtatgggatgggagtattctattttattttattttattctggttcctgcgtttagggtagggtaggaagaaggtgagtgcttttgtatataagtggagtgtctggatcagttttgtggattgtgaatgttagtttcccctttaatgtatatttgtattatttgcttttgagtactcaataaccaagcacaactactagttttaaaggatccatcctcttaaacagtacaaatcgcaaagaaaagctccacacccaaaccaaataattgcagtcgagatgatcagacaatctacgctaaaaaacttcgctattaagcgttgctttcaacatatagcataccgcaacacacctgccatgagatcagtagctctcgcgcagcgcttttatagttcgtcttcccgttattacagtgcgtctccattaccagcctctaaaaggccagagcctgctccaagtttcaatgttgatccattagaacagcccgctgaaccttcaaaattggctaagaaactacgcgctgagcctgacatggatacctctttcgtcggtttaactggtggtcaaatatttaacgaaatgatgtccagacaaaacgttgatactgtatttggttatccaggtggtgctatcctacctgtttacgatgccattcataacagtgataaattcaacttcgttcttccaaaacacgaacaaggtgccggtcacatggcagaaggctacgccagagcttctggtaaaccaggtgttgtcttggttacttctgggccaggtgccaccaatgtcgttactccaatggcagatgcctttgcagacgggattccaatggttgtctttacagggcaagtcccaactagtgctatcggtactgatgctttccaagaggctgacgtcgttggtatttctagatcttgtacgaaatggaatgtcatggtcaagtccgtggaagaattgccattgcgtattaacgaggcttttgaaattgccacgagcggtagaccgggaccagtcttggtcgatttaccaaaggatgttacagcagctatcttaagaaatccaattccaacaaaaacaactcttccatcaaacgcactaaaccaattaaccagtcgcgcacaagatgaatttgtcatgcaaagtatcaataaagcagcagatttgatcaacttggcaaagaaacctgtcttatacgtcggtgctggtattttaaaccatgcagatggtccaagattactaaaagaattaagtgaccgtgctcaaatacctgtcaccactactttacaaggtttaggttcattcgaccaagaagatccaaaatcattggatatgcttggtatgcacggttgtgctactgccaacctggcagtgcaaaatgccgacttgataattgcagttggtgctagattcgacgaccgtgtcactggtaatatttctaaattcgctccagaagctcgtcgtgcagctgccgagggtagaggtggtattattcatttcgaggttagtccaaaaaacataaacaaggttgttcaaactcaaatagcagtggaaggtgatgctacgaccaatctgggcaaaatgatgtcaaagattttcccagttaaggagaggtctgaatggtttgctcaaataaataaatggaagaaggaatacccatacgcttatatggaggagactccaggatctaaaattaaaccacagacggttataaagaaactatccaaggttgccaacgacacaggaagacatgtcattgttacaacgggtgtggggcaacatcaaatgtgggctgctcaacactggacatggagaaatccacatactttcatcacatcaggtggtttaggtacgatgggttacggtctccctgccgccatcggtgctcaagttgcaaagccagaatctttggttattgacattgatggtgacgcatcctttaacatgactctaacggaattgagttctgccgttcaagctggtactccagtgaagattttgattttgaacaatgaagagcaaggtatggttactcaatggcaatccctgttctacgaacatcgttattcccacacacatcaattgaaccctgatttcataaaactagcggaggctatgggtttaaaaggtttaagagtcaagaagcaagaggaattggacgctaagttgaaagaattcgtttctaccaagggcccagttttgcttgaagtggaagttgataaaaaagttcctgttttgccaatggtggcaggtggtagcggtctagacgagttcataaattttgacccagaagttgaaagacaacagactgaattacgtcataagcgtacaggcggtaagcactgaggatccataaaaaacacgctttttcagttcgagtttatcattatcaatactgccatttcaaagaatacgtaaataattaatagtagtgattttcctaactttatttagtcaaaaaattagccttttaattctgctgtaacccgtacatgcccaaaatagggggcgggttacacagaatatataacatcgtaggtgtctgggtgaacagtttattcctggcatccactaaatataatggagcccgctttttaagctggcatccagaaaaaaaaagaatcccagcaccaaaatattgttttcttcaccaaccatcagttcataggtccattctcttagcgcaactacagagaacaggggcacaaacaggcaaaaaacgggcacaacctcaatggagtgatgcaacctgcctggagtaaatgatgacacaaggcaattgacccacgcatgtatctatctcattttcttacaccttctattaccttctgctctctctgatttggaaaaagctgaaaaaaaaggttgaaaccagttccctgaaattattcccctacttgactaataagtatataaagacggtaggtattgattgtaattctgtaaatctatttcttaaacttcttaaattctacttttatagttagtcttttttttagttttaaaacaccaagaacttagtttcgaataaacacacataaacaaacaaaaagcttatggcacctgttacaattgaaaagttcgtaaatcaagaagaacgacaccttgtttccaaccgatcagcaacaattccgtttggtgaatacatatttaaaagattgttgtccatcgatacgaaatcagttttcggtgttcctggtgacttcaacttatctctattagaatatctctattcacctagtgttgaatcagctggcctaagatgggtcggcacgtgtaatgaactgaacgccgcttatgcggccgacggatattcccgttactctaataagattggctgtttaataaccacgtatggcgttggtgaattaagcgccttgaacggtatagccggttcgttcgctgaaaatgtcaaagttttgcacattgttggtgtggccaagtccatagattcgcgttcaagtaactttagtgatcggaacctacatcatttggtcccacagctacatgattcaaattttaaagggccaaatcataaagtatatcatgatatggtaaaagatagagtcgcttgctcggtagcctacttggaggatattgaaactgcatgtgaccaagtcgataatgttatccgcgatatttacaagtattctaaacctggttatatttttgttcctgcagattttgcggatatgtctgttacatgtgataatttggttaatgttccacgtatatctcaacaagattgtatagtatacccttctgaaaaccaattgtctgacataatcaacaagattactagttggatatattccagtaaaacacctgcgatccttggagacgtactgactgataggtatggtgtgagtaactttttgaacaagcttatctgcaaaactgggatttggaatttttccactgttatgggaaaatctgtaattgatgagtcaaacccaacttatatgggtcaatataatggtaaagaaggtttaaaacaagtctatgaacattttgaactgtgcgacttggtcttgcattttggagtcgacatcaatgaaattaataatgggcattatacttttacttataaaccaaatgctaaaatcattcaatttcatccgaattatattcgccttgtggacactaggcagggcaatgagcaaatgttcaaaggaatcaattttgcccctattttaaaagaactatacaagcgcattgacgtttctaaactttctttgcaatatgattcaaatgtaactcaatatacgaacgaaacaatgcggttagaagatcctaccaatggacaatcaagcattattacacaagttcacttacaaaagacgatgcctaaatttttgaaccctggtgatgttgtcgtttgtgaaacaggctcttttcaattctctgttcgtgatttcgcgtttccttcgcaattaaaatatatatcgcaaggatttttcctttccattggcatggcccttcctgccgccctaggtgttggaattgccatgcaagaccactcaaacgctcacatcaatggtggcaacgtaaaagaggactataagccaagattaattttgtttgaaggtgacggtgcagcacagatgacaatccaagaactgagcaccattctgaagtgcaatattccactagaagttatcatttggaacaataacggctacactattgaaagagccatcatgggccctaccaggtcgtataacgacgttatgtcttggaaatggaccaaactatttgaagcattcggagacttcgacggaaagtatactaatagcactctcattcaatgtccctctaaattagcactgaaattggaggagcttaagaattcaaacaaaagaagcgggatagaacttttagaagtcaaattaggcgaattggatttccccgaacagctaaagtgcatggttgaagcagcggcacttaaaagaaataaaaaagtgacacatggttataatgtgcagcgatacaatcagttacgtaaaaattttggattttatagagcatattcttcactaagaggttgtaagagcgttttcagacgtatataggctaggtcatgtaattagttatgtcacgcttacattcacgccctccccccacatccgctctaaccgaaaaggaaggagttagacaacctgaagtctaggtccctatttatttttttatagttatgttagtattaagaacgttatttatatttcaaatttttcttttttttctgtacagacgcgtgtacgcatgtaacattatactgaaaaccttgcttgagaaggttttgggacgctcgaaggctttaatttgcgggtgtacaatatggacttcctcttttctggcaaccaaacccatacatcgggattcctataataccttcgttggtctccctaacatgtaggtggcggaggggagatatacaatagaacagataccagacaagacataatgggctaaacaagactacaccaattacactgcctcattgatggtggtacataacgaactaatactgtagccctagacttgatagccatcatcatatcgaagtttcactaccctttttccatttgccatctattgaagtaataataggcgcatgcaacttcttttctttttttttcttttctctctcccccgttgttgtctcaccatatccgcaatgacaaaaaaatgatggaagacactaaaggaaaaaattaacgacaaagacagcaccaacagatgtcgttgttccagagctgatgaggggtatctcgaagcacacgaaactttttccttccttcattcacgcacactactctctaatgagcaacggtatacggccttccttccagttacttgaatttgaaataaaaaaaagtttgctgtcttgctatcaagtataaatagacctgcaattattaatcttttgtttcctcgtcattgttctcgttccctttcttccttgtttctttttctgcacaatatttcaagctataccaagcatacaatcaactatctcatatacacatatgttatatccagagaaattccaaggcattggtatctccaacgcaaaggattggaagcatcctaaacttgttagtttcgaccccaaacctttcggtgaccatgacgttgatgttgagattgaagcatgtggaatatgtgggagcgattttcatattgcagtaggcaattggggccctgttccggaaaatcaaattttgggtcacgaaattattggtagggtagtgaaggtgggttcaaaatgtcacacgggtgttaagattggtgatagggttggtgtaggtgcccaagcattggcttgtttcgaatgcgaaagatgcaaaagtgataacgaacaatactgtaccaacgatcatgttctaacaatgtggactccttacaaagatggatacatatctcaaggtggatttgcatcacatgttagattgcatgagcattttgcaattcaaattccggagaatatcccatcacctttggctgcaccattattgtgtgggggaataacagtgtttagtcctttattgagaaacggttgtggacctggtaagcgtgtggggattgttggcataggtggtattggtcacatggggatattactagctaaggccatgggagccgaagtttatgcgttcagtagaggacactccaagcgtgaagacagtatgaagttaggggcggaccattatattgccatgttggaggataaaggctggaccgaacaatattcaaatgctcttgatctgttagttgtgtgtagttcttctcttagtaaagttaattttgactcgattgtgaaaataatgaagattggcggctccattgtttccattgctgctccagaagttaacgagaagctggtactaaaaccactgggtctgatgggggtatctatctcatcttctgctatcggttcaagaaaagaaatagaacagctattaaagctagtcagcgagaaaaatgtgaagatttgggtagagaagctacccataagcgaggagggtgtatctcacgcatttacgagaatggaatccggagatgttaagtacaggtttacacttgtagactatgacaagaaattccataagtgagcggccgcataacaatactgacagtactaaataattgcctacttggcttcacatacgttgcatacgtcgatatagataataatgataatgacagcaggattatcgtaatacgtaatagttgaaaatctcaaaaatgtgtgggtcattacgtaaataatgataggaatgggattcttctatttttcctttttccattctagcagccgtcgggaaaacgtggcatcctctctttcgggctcaattggagtcacgctgccgtgagcatcctctctttccatatctaacaactgagcacgtaaccaatggaaaagcatgagcttagcgttgctccaaaaaagtattggatggttaataccatttgtctgttctcttctgactttgactcctcaaaaaaaaaaaatctacaatcaacagatcgcttcaattacgccctcacaaaaacttttttccttcttcttcgcccacgttaaattttatccctcatgttgtctaacggatttctgcacttgatttattataaaaagacaaagacataatacttctctatcaatttcagttattgttcttccttgcgttattcttctgttcttctttttcttttgtcatatataaccataaccaagtaatacatattcaaactcgagatgtccaaagctacttataaagaaagggctgcaacccatccatccccagtggcagctaaactgtttaacataatgcacgaaaaacaaactaacttatgcgcatcattagatgtaagaactactaaagagctactggagttggttgaggctttaggtccaaaaatttgtttgttgaagacacatgttgacatattaacagatttttctatggagggtaccgttaagcctctgaaagcgttaagcgcgaaatataactttcttttatttgaagaccgtaagtttgctgatattggaaatactgttaagttgcaatatagcgcaggagtttatagaattgccgaatgggctgacattacgaatgcccacggtgttgtaggtcctggcattgtgtctggattgaaacaagcggcagaggaagtgactaaggaaccaagaggtttactaatgctggcggaattatcttgcaaaggctctctagccaccggtgaatatacaaaaggtactgtggatattgcaaagtctgataaggacttcgtaatcggttttattgcacaaagagatatgggaggtcgtgagaattcaaaatgaagtgaagttcctatactttctagagaataggaacttctatagtgagtcgaataagggcgacacaaaatttattctaaatgcataataaatactgataacatcttatagtttgtattatattttgtattatcgttgacatgtataattttgatatcaaaaactgattttccctttattattttcgagatttattttcttaattctctttaacaaactagaaatattgtatatacaaaaaatcataaataatagatgaatagtttaattataggtgttcatcaatcgaaaaagcaacgtatcttatttaaagtgcgttgcttttttctcatttataaggttaaataattctcatatatcaagcaaagtgacaggcgcccttaaatattctgacaaatgctctttccctaaactccccccataaaaaaacccgccgaagcgggtttttacgttatttgcggattaacgattactcgttatcagaaccgcccagggggcccgagcttaagactggccgtcgttttacaacacagaaagagtttgtagaaacgcaaaaaggccatccgtcaggggccttctgcttagtttgatgcctggcagttccctactctcgccttccgcttcctcgctcactgactcgctgcgctcggtcgttcggctgcggcgagcggtatcagctcactcaaaggcggtaatacggttatccacagaatcaggggataacgcaggaaagaacatgtgagcaaaaggccagcaaaaggccaggaaccgtaaaaaggccgcgttgctggcgtttttccataggctccgcccccctgacgagcatcacaaaaatcgacgctcaagtcagaggtggcgaaacccgacaggactataaagataccaggcgtttccccctggaagctccctcgtgcgctctcctgttccgaccctgccgcttaccggatacctgtccgcctttctcccttcgggaagcgtggcgctttctcatagctcacgctgtaggtatctcagttcggtgtaggtcgttcgctccaagctgggctgtgtgcacgaaccccccgttcagcccgaccgctgcgccttatccggtaactatcgtcttgagtccaacccggtaagacacgacttatcgccactggcagcagccactggtaacaggattagcagagcgaggtatgtaggcggtgctacagagttcttgaagtggtgggctaactacggctacactagaagaacagtatttggtatctgcgctctgctgaagccagttaccttcggaaaaagagttggtagctcttgatccggcaaacaaaccaccgctggtagcggtggtttttttgtttgcaagcagcagattacgcgcagaaaaaaaggatctcaagaagatcctttgatcttttctacggggtctgacgctcagtggaacgacgcgcgcgtaactcacgttaagggattttggtcatgagcttgcgccgtcccgtcaagtcagcgtaatgctctgcttt

SEQ ID NO: 25 - DNA, 10896 bp, Artificial Sequence
  Plasmid pGV5999
tagaaaaactcatcgagcatcaaatgaaactgcaatttattcatatcaggattatcaataccatatttttgaaaaagccgtttctgtaatgaaggagaaaactcaccgaggcagttccataggatggcaagatcctggtatcggtctgcgattccgactcgtccaacatcaatacaacctattaatttcccctcgtcaaaaataaggttatcaagtgagaaatcaccatgagtgacgactgaatccggtgagaatggcaaaagtttatgcatttctttccagacttgttcaacaggccagccattacgctcgtcatcaaaatcactcgcatcaaccaaaccgttattcattcgtgattgcgcctgagcgaggcgaaatacgcgatcgctgttaaaaggacaattacaaacaggaatcgagtgcaaccggcgcaggaacactgccagcgcatcaacaatattttcacctgaatcaggatattcttctaatacctggaacgctgtttttccggggatcgcagtggtgagtaaccatgcatcatcaggagtacggataaaatgcttgatggtcggaagtggcataaattccgtcagccagtttagtctgaccatctcatctgtaacatcattggcaacgctacctttgccatgtttcagaaacaactctggcgcatcgggcttcccatacaagcgatagattgtcgcacctgattgcccgacattatcgcgagcccatttatacccatataaatcagcatccatgttggaatttaatcgcggcctcgacgtttcccgttgaatatggctcatattcttcctttttcaatattattgaagcatttatcagggttattgtctcatgagcggatacatatttgaatgtatttagaaaaataaacaaataggggtcagtgttacaaccaattaaccaattctgaacattatcgcgagcccatttatacctgaatatggctcataacaccccttgtttgcctggcggcagtagcgcggtggtcccacctgaccccatgccgaactcagaagtgaaacgccgtagcgccgatggtagtgtggggactccccatgcgagagtagggaactgccaggcatcaaataaaacgaaaggctcagtcgaaagactgggcctttcgcccgggctaattagggggtgtcgcccttattcgactctatagtgaagttcctattctctagaaagtataggaacttctgaagtggggattcagctgaggtatttctttttacaggattgcgcttccagtaaattcggtctgttccattgcgacttgttgaatggcattggcgatgccaatgcccaattccatgggcaacgagtaagtaagtctcttctacatcgtcctattcctttcctaatgtgagctctttttaccttttggtacccatacaacgagtgtcatggggagaggaagaggaagattttagatgtagtgaaagtgaatagatgaaatgggaaatgggcgtgtggtgcggtttctgtggtatagaaaatcggaaatgagagtcaaccaaggtaaaaggtgggataatttcatggtattggaaattattcaaattagctaaccattgctggcccttgtgcgtgtcctgtattttgcatattctgtatttgctatgtagaaccatgggatagattatgcaatatttgtgaaaagattcaaccttttaaggtgtatacgtagtattggcccatgaatatcttaaggttggaatagtagtaccacttgtgtcaattatccattaaggggggagagtgaggtgagaggcagggctggctgggtggtgaatatgacctttctattttttttagttaactcagataaagtataaatacatgggcatgattatctgtaatggctagagtttcccatcatgtcttaatcataatcttaattatatacttttgattacctcaaaaaccatccactaaagccaaacatattatagtattaactattaatattaaggataaaactacaactcaaaaccaacttaaattacagtcgacatgttgactaaagctacaaaagagcagaaatcattggtgaaaaataggggtgcagaacttgttgtggactgtttggtagaacagggcgtaacacatgtttttggtatcccaggtgcaaaaatcgacgccgtgtttgatgcattacaagacaagggtccagaaattattgttgctagacatgagcaaaatgccgcatttatggcgcaagctgtaggtaggcttacaggtaaacctggtgttgtcctagttacgtctggcccaggagcctccaatttagcaactggtctattgacagctaatactgagggagatcctgtagttgcgttagccggtaatgtaattagagctgataggcttaagagaactcaccagtctctagacaacgctgctttattccaaccgatcaccaagtactcagtagaggtacaagacgtaaagaatatacctgaagctgtgacaaacgcatttcgtatagcttctgctggtcaggctggtgccgcgtttgtttcttttcctcaagacgttgtcaatgaagtgaccaatactaaaaacgttagagcggttgcagcccctaaactaggtccagccgcagacgacgcaattagcgctgcaattgctaaaattcagacggcgaaactaccagtagtccttgtcggtatgaagggcggaagaccagaagcaataaaagctgttcgtaagttattgaagaaagtccaattacctttcgttgagacttaccaagcagcaggtactttatctagagatttagaggatcagtattttggaaggataggtctatttagaaaccaaccaggagatttactattagaacaagctgatgttgtacttactatcggttatgatcctatagagtatgacccaaagttttggaacataaatggggatagaacaattatacatctagacgagataatcgccgacatcgatcacgcttatcaaccagatttagaactaatcggagatatcccgtcaacaatcaatcatattgaacatgatgctgtaaaggttgagttcgctgaacgtgagcagaaaatcttatctgatctaaagcaatatatgcatgagggtgaacaagttccagcagactggaaatctgaccgtgcacatcctttggaaatcgttaaggaactaagaaatgcggtcgatgatcatgtgactgttacatgtgatatcggttcacatgcaatttggatgtcacgttattttaggagctacgaaccattaactttaatgatatctaacgggatgcaaactctgggggttgcacttccttgggctattggcgctagtttagttaagcccggtgagaaggtggtatcggtatcaggtgatggtggctttctgttttcggctatggaattagaaactgcagtccgtttaaaagctcccattgtgcatattgtctggaatgattctacttacgacatggttgcttttcaacagttgaagaaatacaatagaacttcggctgtagactttggtaacatcgatattgtgaaatatgctgagtcttttggcgcaacaggcctgagggtggaaagtccagatcagttagctgatgtgttgagacaagggatgaatgccgagggaccggtaatcatagatgtgccagttgactactcagacaatattaatttggcttctgataaacttcctaaagagtttggcgagctaatgaagaccaaagccttataaggatccataaaaaacacgctttttcagttcgagtttatcattatcaatactgccatttcaaagaatacgtaaataattaatagtagtgattttcctaactttatttagtcaaaaaattagccttttaattctgctgtaacccgtacatgcccaaaatagggggcgggttacacagaatatataacatcgtaggtgtctgggtgaacagtttattcctggcatccactaaatataatggagcccgctttttaagctggcatccagaaaaaaaaagaatcccagcaccaaaatattgttttcttcaccaaccatcagttcataggtccattctcttagcgcaactacagagaacaggggcacaaacaggcaaaaaacgggcacaacctcaatggagtgatgcaacctgcctggagtaaatgatgacacaaggcaattgacccacgcatgtatctatctcattttcttacaccttctattaccttctgctctctctgatttggaaaaagctgaaaaaaaaggttgaaaccagttccctgaaattattcccctacttgactaataagtatataaagacggtaggtattgattgtaattctgtaaatctatttcttaaacttcttaaattctacttttatagttagtcttttttttagttttaaaacaccaagaacttagtttcgaataaacacacataaacaaacaaaaagcttatgtatactgttggagattatttgttagatagattgcatgaactaggcattgaagaaattttcggagttcccggggattacaatctgcaatttctagaccagattatttcacataaagacatgaaatgggtcggaaatgcaaatgagttaaatgcatcttacatggccgatggttatgccagaaccaaaaaggcggctgctttcttgactaccttcggggtgggtgaattatcggcagttaatggcttggctggatcatacgcagaaaacttgcctgtcgttgaaatcgttggctcgccaacatcaaaagttcaaaatgaaggaaaattcgtccaccacactttggcagatggtgacttcaagcacttcatgaaaatgcatgaacctgtaacggctgccagaactctactaactgctgagaatgcaactgtagagattgatcgtgtcttgagcgctcttttaaaggaaagaaagccagtctatattaacctgccagtagacgtcgcagcggccaaagcagagaagcctagcttaccacttaaaaaggaaaatagtacctcaaacacttcagatcaagagattcttaacaagatccaggaatctttgaaaaacgctaaaaagcccattgttataactggccatgagatcatatcatttggtttggagaaaacagtgacccagttcattagtaagacgaaactgccaataaccactctaaatttcggtaagtcctccgttgatgaagcgttgcctagcttcttgggtatttacaacggcaccttgtcagaacccaatctgaaagaatttgttgaatctgcagactttatattgatgttgggagtaaagttgactgacagctctactggtgcttttacacaccatctgaatgaaaacaagatgatatctcttaatatcgatgaaggtaagatattcaatgaaagaatacagaacttcgacttcgagagtctaatttcttccttactggacttaagtgaaatcgagtataaaggtaagtacattgacaaaaagcaggaagattttgttccgagcaacgcgctacttagtcaagatagattatggcaagctgttgaaaatctgacacaatccaatgagacaattgttgccgaacaaggtacctccttttttggcgcttcttccatcttcctaaagtccaagtctcatttcatagggcagccattgtggggtagcatcggttacacctttcctgctgctctagggtcccaaattgctgataaagaaagtagacatttgttgtttataggagacggatctttacaattgacagttcaagagttaggtttagccatcagagagaagattaatcctatctgcttcataataaacaacgatggctatacagttgagagggaaattcatggacctaatcaatcttataatgatataccaatgtggaattatagcaagttacctgaatcttttggggctaccgaggatcgtgttgtttctaagattgtaagaaccgaaaatgaatttgtttctgttatgaaggaagcacaagcggaccctaacaggatgtactggattgagttaattcttgctaaggagggtgcgccaaaggttctaaagaagatgggtaagttgttcgccgaacaaaacaaatcctaacctaggtcatgtaattagttatgtcacgcttacattcacgccctccccccacatccgctctaaccgaaaaggaaggagttagacaacctgaagtctaggtccctatttatttttttatagttatgttagtattaagaacgttatttatatttcaaatttttcttttttttctgtacagacgcgtgtacgcatgtaacattatactgaaaaccttgcttgagaaggttttgggacgctcgaaggctttaatttgcgggtgtacaatatggacttcctcttttctggcaaccaaacccatacatcgggattcctataataccttcgttggtctccctaacatgtaggtggcggaggggagatatacaatagaacagataccagacaagacataatgggctaaacaagactacaccaattacactgcctcattgatggtggtacataacgaactaatactgtagccctagacttgatagccatcatcatatcgaagtttcactaccctttttccatttgccatctattgaagtaataataggcgcatgcaacttcttttctttttttttcttttctctctcccccgttgttgtctcaccatatccgcaatgacaaaaaaatgatggaagacactaaaggaaaaaattaacgacaaagacagcaccaacagatgtcgttgttccagagctgatgaggggtatctcgaagcacacgaaactttttccttccttcattcacgcacactactctctaatgagcaacggtatacggccttccttccagttacttgaatttgaaataaaaaaaagtttgctgtcttgctatcaagtataaatagacctgcaattattaatcttttgtttcctcgtcattgttctcgttccctttcttccttgtttctttttctgcacaatatttcaagctataccaagcatacaatcaactatctcatatacacatatgttatatccagagaaattccaaggcattggtatctccaacgcaaaggattggaagcatcctaaacttgttagtttcgaccccaaacctttcggtgaccatgacgttgatgttgagattgaagcatgtggaatatgtgggagcgattttcatattgcagtaggcaattggggccctgttccggaaaatcaaattttgggtcacgaaattattggtagggtagtgaaggtgggttcaaaatgtcacacgggtgttaagattggtgatagggttggtgtaggtgcccaagcattggcttgtttcgaatgcgaaagatgcaaaagtgataacgaacaatactgtaccaacgatcatgttctaacaatgtggactccttacaaagatggatacatatctcaaggtggatttgcatcacatgttagattgcatgagcattttgcaattcaaattccggagaatatcccatcacctttggctgcaccattattgtgtgggggaataacagtgtttagtcctttattgagaaacggttgtggacctggtaagcgtgtggggattgttggcataggtggtattggtcacatggggatattactagctaaggccatgggagccgaagtttatgcgttcagtagaggacactccaagcgtgaagacagtatgaagttaggggcggaccattatattgccatgttggaggataaaggctggaccgaacaatattcaaatgctcttgatctgttagttgtgtgtagttcttctcttagtaaagttaattttgactcgattgtgaaaataatgaagattggcggctccattgtttccattgctgctccagaagttaacgagaagctggtactaaaaccactgggtctgatgggggtatctatctcatcttctgctatcggttcaagaaaagaaatagaacagctattaaagctagtcagcgagaaaaatgtgaagatttgggtagagaagctacccataagcgaggagggtgtatctcacgcatttacgagaatggaatccggagatgttaagtacaggtttacacttgtagactatgacaagaaattccataagtgagcggccgcataacaatactgacagtactaaataattgcctacttggcttcacatacgttgcatacgtcgatatagataataatgataatgacagcaggattatcgtaatacgtaatagttgaaaatctcaaaaatgtgtgggtcattacgtaaataatgataggaatgggattcttctatttttcctttttccattctagcagccgtcgggaaaacgtggcatcctctctttcgggctcaattggagtcacgctgccgtgagcatcctctctttccatatctaacaactgagcacgtaaccaatggaaaagcatgagcttagcgttgctccaaaaaagtattggatggttaataccatttgtctgttctcttctgactttgactcctcaaaaaaaaaaaatctacaatcaacagatcgcttcaattacgccctcacaaaaacttttttccttcttcttcgcccacgttaaattttatccctcatgttgtctaacggatttctgcacttgatttattataaaaagacaaagacataatacttctctatcaatttcagttattgttcttccttgcgttattcttctgttcttctttttcttttgtcatatataaccataaccaagtaatacatattcaaactcgagatgtccaaagctacttataaagaaagggctgcaacccatccatccccagtggcagctaaactgtttaacataatgcacgaaaaacaaactaacttatgcgcatcattagatgtaagaactactaaagagctactggagttggttgaggctttaggtccaaaaatttgtttgttgaagacacatgttgacatattaacagatttttctatggagggtaccgttaagcctctgaaagcgttaagcgcgaaatataactttcttttatttgaagaccgtaagtttgctgatattggaaatactgttaagttgcaatatagcgcaggagtttatagaattgccgaatgggctgacattacgaatgcccacggtgttgtaggtcctggcattgtgtctggattgaaacaagcggcagaggaagtgactaaggaaccaagaggtttactaatgctggcggaattatcttgcaaaggctctctagccaccggtgaatatacaaaaggtactgtggatattgcaaagtctgataaggacttcgtaatcggttttattgcacaaagagatatgggaggtcgtgagaattcaaaatgaagtgaagttcctatactttctagagaataggaacttctatagtgagtcgaataagggcgacacaaaatttattctaaatgcataataaatactgataacatcttatagtttgtattatattttgtattatcgttgacatgtataattttgatatcaaaaactgattttccctttattattttcgagatttattttcttaattctctttaacaaactagaaatattgtatatacaaaaaatcataaataatagatgaatagtttaattataggtgttcatcaatcgaaaaagcaacgtatcttatttaaagtgcgttgcttttttctcatttataaggttaaataattctcatatatcaagcaaagtgacaggcgcccttaaatattctgacaaatgctctttccctaaactccccccataaaaaaacccgccgaagcgggtttttacgttatttgcggattaacgattactcgttatcagaaccgcccagggggcccgagcttaagactggccgtcgttttacaacacagaaagagtttgtagaaacgcaaaaaggccatccgtcaggggccttctgcttagtttgatgcctggcagttccctactctcgccttccgcttcctcgctcactgactcgctgcgctcggtcgttcggctgcggcgagcggtatcagctcactcaaaggcggtaatacggttatccacagaatcaggggataacgcaggaaagaacatgtgagcaaaaggccagcaaaaggccaggaaccgtaaaaaggccgcgttgctggcgtttttccataggctccgcccccctgacgagcatcacaaaaatcgacgctcaagtcagaggtggcgaaacccgacaggactataaagataccaggcgtttccccctggaagctccctcgtgcgctctcctgttccgaccctgccgcttaccggatacctgtccgcctttctcccttcgggaagcgtggcgctttctcatagctcacgctgtaggtatctcagttcggtgtaggtcgttcgctccaagctgggctgtgtgcacgaaccccccgttcagcccgaccgctgcgccttatccggtaactatcgtcttgagtccaacccggtaagacacgacttatcgccactggcagcagccactggtaacaggattagcagagcgaggtatgtaggcggtgctacagagttcttgaagtggtgggctaactacggctacactagaagaacagtatttggtatctgcgctctgctgaagccagttaccttcggaaaaagagttggtagctcttgatccggcaaacaaaccaccgctggtagcggtggtttttttgtttgcaagcagcagattacgcgcagaaaaaaaggatctcaagaagatcctttgatcttttctacggggtctgacgctcagtggaacgacgcgcgcgtaactcacgttaagggattttggtcatgagcttgcgccgtcccgtcaagtcagcgtaatgctctgcttt

SEQ ID NO: 26 - DNA, 8484 bp, Artificial Sequence
  Plasmid pGV6000
tagaaaaactcatcgagcatcaaatgaaactgcaatttattcatatcaggattatcaataccatatttttgaaaaagccgtttctgtaatgaaggagaaaactcaccgaggcagttccataggatggcaagatcctggtatcggtctgcgattccgactcgtccaacatcaatacaacctattaatttcccctcgtcaaaaataaggttatcaagtgagaaatcaccatgagtgacgactgaatccggtgagaatggcaaaagtttatgcatttctttccagacttgttcaacaggccagccattacgctcgtcatcaaaatcactcgcatcaaccaaaccgttattcattcgtgattgcgcctgagcgaggcgaaatacgcgatcgctgttaaaaggacaattacaaacaggaatcgagtgcaaccggcgcaggaacactgccagcgcatcaacaatattttcacctgaatcaggatattcttctaatacctggaacgctgtttttccggggatcgcagtggtgagtaaccatgcatcatcaggagtacggataaaatgcttgatggtcggaagtggcataaattccgtcagccagtttagtctgaccatctcatctgtaacatcattggcaacgctacctttgccatgtttcagaaacaactctggcgcatcgggcttcccatacaagcgatagattgtcgcacctgattgcccgacattatcgcgagcccatttatacccatataaatcagcatccatgttggaatttaatcgcggcctcgacgtttcccgttgaatatggctcatattcttcctttttcaatattattgaagcatttatcagggttattgtctcatgagcggatacatatttgaatgtatttagaaaaataaacaaataggggtcagtgttacaaccaattaaccaattctgaacattatcgcgagcccatttatacctgaatatggctcataacaccccttgtttgcctggcggcagtagcgcggtggtcccacctgaccccatgccgaactcagaagtgaaacgccgtagcgccgatggtagtgtggggactccccatgcgagagtagggaactgccaggcatcaaataaaacgaaaggctcagtcgaaagactgggcctttcgcccgggctaattagggggtgtcgcccttattcgactctatagtgaagttcctattctctagaaagtataggaacttctgaagtggggctagccacgaaaaacaaactaacttatgcgcatcattagatgtaagaactactaaagagctactggagttggttgaggctttaggtccaaaaatttgtttgttgaagacacatgttgacatattaacagatttttctatggagggtaccgttaagcctctgaaagcgttaagcgcgaaatataactttcttttatttgaagaccgtaagtttgctgatattggaaatactgttaagttgcaatatagcgcaggagtttatagaattgccgaatgggctgacattacgaatgcccacggtgttgtaggtcctggcattgtgtctggattgaaacaagcggcagaggaagtgactaaggaaccaagaggtttactaatgctggcggaattatcttgcaaaggctctctagccaccggtgaatatacaaaaggtactgtggatattgcaaagtctgataaggacttcgtaatcggttttattgcacaaagagatatgggaggtcgtgacgagggctacgattggttaattatgacaccaggcgtaggattagatgacaaaggcgatgcgttaggccaacagtatcgtacagtcgatgatgtcgtaagtaccggttctgatatcattattgtcgggagaggtttatttgccaagggccgtgatgcgaaagtggagggggaaagatataggaaggcaggttgggaggcttacttgagaagatgtggtcagcagaattaagcggccgcataacaatactgacagtactaaataattgcctacttggcttcacatacgttgcatacgtcgatatagataataatgataatgacagcaggattatcgtaatacgtaatagttgaaaatctcaaaaatgtgtgggtcattacgtaaataatgataggaatgggattcttctatttttcctttttccattctagcagccgtcgggaaaacgtggcatcctctctttcgggctcaattggagtcacgctgccgtgagcatcctctctttccatatctaacaactgagcacgtaaccaatggaaaagcatgagcttagcgttgctccaaaaaagtattggatggttaataccatttgtctgttctcttctgactttgactcctcaaaaaaaaaaaatctacaatcaacagatcgcttcaattacgccctcacaaaaacttttttccttcttcttcgcccacgttaaattttatccctcatgttgtctaacggatttctgcacttgatttattataaaaagacaaagacataatacttctctatcaatttcagttattgttcttccttgcgttattcttctgttcttctttttcttttgtcatatataaccataaccaagtaatacatattcaaactcgagatgttgagaactcaagccgccagattgatctgcaactcccgtgtcatcactgctaagagaacctttgctttggccacccgtgctgctgcttacagcagaccagctgcccgtttcgttaagccaatgatcactacccgtggtttgaagcaaatcaacttcggtggtactgttgaaaccgtctacgaaagagctgactggccaagagaaaagttgttggactacttcaagaacgacacttttgctttgatcggttacggttcccaaggttacggtcaaggtttgaacttgagagacaacggtttgaacgttatcattggtgtccgtaaagatggtgcttcttggaaggctgccatcgaagacggttgggttccaggcaagaacttgttcactgttgaagatgctatcaagagaggtagttacgttatgaacttgttgtccgatgccgctcaatcagaaacctggcctgctatcaagccattgttgaccaagggtaagactttgtacttctcccacggtttctccccagtcttcaaggacttgactcacgttgaaccaccaaaggacttagatgttatcttggttgctccaaagggttccggtagaactgtcagatctttgttcaaggaaggtcgtggtattaactcttcttacgccgtctggaacgatgtcaccggtaaggctcacgaaaaggcccaagctttggccgttgccattggttccggttacgtttaccaaaccactttcgaaagagaagtcaactctgacttgtacggtgaaagaggttgtttaatgggtggtatccacggtatgttcttggctcaatacgacgtcttgagagaaaacggtcactccccatctgaagctttcaacgaaaccgtcgaagaagctacccaatctctatacccattgatcggtaagtacggtatggattacatgtacgatgcttgttccaccaccgccagaagaggtgctttggactggtacccaatcttcaagaatgctttgaagcctgttttccaagacttgtacgaatctaccaagaacggtaccgaaaccaagagatctttggaattcaactctcaacctgactacagagaaaagctagaaaaggaattagacaccatcagaaacatggaaatctggaaggttggtaaggaagtcagaaagttgagaccagaaaaccaataacctaggatcttgtttaaagattacggatatttaacttacttagaataatgccatttttttgagttataataatcctacgttagtgtgagcgggatttaaactgtgaggaccttaatacattcagacacttctgcggtatcaccctacttattcccttcgagattatatctaggaacccatcaggttggtggaagattacccgttctaagacttttcagcttcctctattgatgttacacctggacaccccttttctggcatccagtttttaatcttcagtggcatgtgagattctccgaaattaattaaagcaatcacacaattctctcggataccacctcggttgaaactgacaggtggtttgttacgcatgctaatgcaaaggagcctatatacctttggctcggctgctgtaacagggaatataaagggcagcataatttaggagtttagtgaacttgcaacatttactattttcccttcttacgtaaatatttttctttttaattctaaatcaatctttttcaattttttgtttgtattcttttcttgcttaaatctataactacaaaaaacacatacataaactaaaagtcgacatgggcttgttaacgaaagttgctacatctagacaattctctacaacgagatgcgttgcaaagaagctcaacaagtactcgtatatcatcactgaacctaagggccaaggtgcgtcccaggccatgctttatgccaccggtttcaagaaggaagatttcaagaagcctcaagtcggggttggttcctgttggtggtccggtaacccatgtaacatgcatctattggacttgaataacagatgttctcaatccattgaaaaagcgggtttgaaagctatgcagttcaacaccatcggtgtttcagacggtatctctatgggtactaaaggtatgagatactcgttacaaagtagagaaatcattgcagactcctttgaaaccatcatgatggcacaacactacgatgctaacatcgccatcccatcatgtgacaaaaacatgcccggtgtcatgatggccatgggtagacataacagaccttccatcatggtatatggtggtactatcttgcccggtcatccaacatgtggttcttcgaagatctctaaaaacatcgatatcgtctctgcgttccaatcctacggtgaatatatttccaagcaattcactgaagaagaaagagaagatgttgtggaacatgcatgcccaggtcctggttcttgtggtggtatgtatactgccaacacaatggcttctgccgctgaagtgctaggtttgaccattccaaactcctcttccttcccagccgtttccaaggagaagttagctgagtgtgacaacattggtgaatacatcaagaagacaatggaattgggtattttacctcgtgatatcctcacaaaagaggcttttgaaaacgccattacttatgtcgttgcaaccggtgggtccactaatgctgttttgcatttggtggctgttgctcactctgcgggtgtcaagttgtcaccagatgatttccaaagaatcagtgatactacaccattgatcggtgacttcaaaccttctggtaaatacgtcatggccgatttgattaacgttggtggtacccaatctgtgattaagtatctatatgaaaacaacatgttgcacggtaacacaatgactgttaccggtgacactttggcagaacgtgcaaagaaagcaccaagcctacctgaaggacaagagattattaagccactctcccacccaatcaaggccaacggtcacttgcaaattctgtacggttcattggcaccaggtggagctgtgggtaaaattaccggtaaggaaggtacttacttcaagggtagagcacgtgtgttcgaagaggaaggtgcctttattgaagccttggaaagaggtgaaatcaagaagggtgaaaaaaccgttgttgttatcagatatgaaggtccaagaggtgcaccaggtatgcctgaaatgctaaagccttcctctgctctgatgggttacggtttgggtaaagatgttgcattgttgactgatggtagattctctggtggttctcacgggttcttaatcggccacattgttcccgaagccgctgaaggtggtcctatcgggttggtcagagacggcgatgagattatcattgatgctgataataacaagattgacctattagtctctgataaggaaatggctcaacgtaaacaaagttgggttgcacctccacctcgttacacaagaggtactctatccaagtatgctaagttggtttccaacgcttccaacggttgtgttttagatgcttgaggatcctcgaattttagtgatttgatttctaaatgatatatatgaacgatatactctttatttctttcttttaccccatttgaaacgtttacgccaatagttgctacaactgcaaaggtatcccctttgttggctttactatactgatgtggagaagtcacagttttcttgatactcttcatatacagaattttataagtacattaatagtaatggaataatacttgatagataaaaaccacaatctttgttgaatgctctatagagaaattgtagataaaggactaaatttagttaccacaagttagagattaagtcgttagtccttatccttcgaatacggtaccgatatttggtgagatatacgatgggtctttttaaacctaagaatcaacccacgttaaaattttctttgttgatattattataatagctcaaaatattcaatcagtaacatccgaaatcaatattatcagcatctagcttcttcttttaactagagtctgaaaccatcggaatgaccatctcgtgcaaccgatatattatgagcataaaattaattagagaatacatatatttattgatgaaacggaaaggcagccagtatgatgacggcgcaagtatactctctaaatctttgttgaagaaattgaattaaacttgggaaagaaatgtaaactaagcgacacgaggagaatacagccgaacctgtatcaaccggatatgattaaggagtctttattcgcttctttttattaatgtatatgcaaatttgatttgtattacctgatacttatggggggaggaagcttaaaatgaagtgaagttcctatactttctagagaataggaacttctatagtgagtcgaataagggcgacacaaaatttattctaaatgcataataaatactgataacatcttatagtttgtattatattttgtattatcgttgacatgtataattttgatatcaaaaactgattttccctttattattttcgagatttattttcttaattctctttaacaaactagaaatattgtatatacaaaaaatcataaataatagatgaatagtttaattataggtgttcatcaatcgaaaaagcaacgtatcttatttaaagtgcgttgcttttttctcatttataaggttaaataattctcatatatcaagcaaagtgacaggcgcccttaaatattctgacaaatgctctttccctaaactccccccataaaaaaacccgccgaagcgggtttttacgttatttgcggattaacgattactcgttatcagaaccgcccagggggcccgagcttaagactggccgtcgttttacaacacagaaagagtttgtagaaacgcaaaaaggccatccgtcaggggccttctgcttagtttgatgcctggcagttccctactctcgccttccgcttcctcgctcactgactcgctgcgctcggtcgttcggctgcggcgagcggtatcagctcactcaaaggcggtaatacggttatccacagaatcaggggataacgcaggaaagaacatgtgagcaaaaggccagcaaaaggccaggaaccgtaaaaaggccgcgttgctggcgtttttccataggctccgcccccctgacgagcatcacaaaaatcgacgctcaagtcagaggtggcgaaacccgacaggactataaagataccaggcgtttccccctggaagctccctcgtgcgctctcctgttccgaccctgccgcttaccggatacctgtccgcctttctcccttcgggaagcgtggcgctttctcatagctcacgctgtaggtatctcagttcggtgtaggtcgttcgctccaagctgggctgtgtgcacgaaccccccgttcagcccgaccgctgcgccttatccggtaactatcgtcttgagtccaacccggtaagacacgacttatcgccactggcagcagccactggtaacaggattagcagagcgaggtatgtaggcggtgctacagagttcttgaagtggtgggctaactacggctacactagaagaacagtatttggtatctgcgctctgctgaagccagttaccttcggaaaaagagttggtagctcttgatccggcaaacaaaccaccgctggtagcggtggtttttttgtttgcaagcagcagattacgcgcagaaaaaaaggatctcaagaagatcctttgatcttttctacggggtctgacgctcagtggaacgacgcgcgcgtaactcacgttaagggattttggtcatgagcttgcgccgtcccgtcaagtcagcgtaatgctctgcttt

SEQ ID NO: 27 - DNA, 11079 bp, Artificial Sequence
  Plasmid pGV6001
tagaaaaactcatcgagcatcaaatgaaactgcaatttattcatatcaggattatcaataccatatttttgaaaaagccgtttctgtaatgaaggagaaaactcaccgaggcagttccataggatggcaagatcctggtatcggtctgcgattccgactcgtccaacatcaatacaacctattaatttcccctcgtcaaaaataaggttatcaagtgagaaatcaccatgagtgacgactgaatccggtgagaatggcaaaagtttatgcatttctttccagacttgttcaacaggccagccattacgctcgtcatcaaaatcactcgcatcaaccaaaccgttattcattcgtgattgcgcctgagcgaggcgaaatacgcgatcgctgttaaaaggacaattacaaacaggaatcgagtgcaaccggcgcaggaacactgccagcgcatcaacaatattttcacctgaatcaggatattcttctaatacctggaacgctgtttttccggggatcgcagtggtgagtaaccatgcatcatcaggagtacggataaaatgcttgatggtcggaagtggcataaattccgtcagccagtttagtctgaccatctcatctgtaacatcattggcaacgctacctttgccatgtttcagaaacaactctggcgcatcgggcttcccatacaagcgatagattgtcgcacctgattgcccgacattatcgcgagcccatttatacccatataaatcagcatccatgttggaatttaatcgcggcctcgacgtttcccgttgaatatggctcatattcttcctttttcaatattattgaagcatttatcagggttattgtctcatgagcggatacatatttgaatgtatttagaaaaataaacaaataggggtcagtgttacaaccaattaaccaattctgaacattatcgcgagcccatttatacctgaatatggctcataacaccccttgtttgcctggcggcagtagcgcggtggtcccacctgaccccatgccgaactcagaagtgaaacgccgtagcgccgatggtagtgtggggactccccatgcgagagtagggaactgccaggcatcaaataaaacgaaaggctcagtcgaaagactgggcctttcgcccgggctaattagggggtgtcgcccttattcgactctatagtgaagttcctattctctagaaagtataggaacttctgaagtggggattcagctgaggtatttctttttacaggattgcgcttccagtaaattcggtctgttccattgcgacttgttgaatggcattggcgatgccaatgcccaattccatgggcaacgagtaagtaagtctcttctacatcgtcctattcctttcctaatgtgagctctttttaccttttggtacccatacaacgagtgtcatggggagaggaagaggaagattttagatgtagtgaaagtgaatagatgaaatgggaaatgggcgtgtggtgcggtttctgtggtatagaaaatcggaaatgagagtcaaccaaggtaaaaggtgggataatttcatggtattggaaattattcaaattagctaaccattgctggcccttgtgcgtgtcctgtattttgcatattctgtatttgctatgtagaaccatgggatagattatgcaatatttgtgaaaagattcaaccttttaaggtgtatacgtagtattggcccatgaatatcttaaggttggaatagtagtaccacttgtgtcaattatccattaaggggggagagtgaggtgagaggcagggctggctgggtggtgaatatgacctttctattttttttagttaactcagataaagtataaatacatgggcatgattatctgtaatggctagagtttcccatcatgtcttaatcataatcttaattatatacttttgattacctcaaaaaccatccactaaagccaaacatattatagtattaactattaatattaaggataaaactacaactcaaaaccaacttaaattacagtcgagatgctttcactacgtcaatctataagatttttcaagccagccacaagaactttgtgtagctctagatatctgcttatgttgactaaagctacaaaagagcagaaatcattggtgaaaaataggggtgcagaacttgttgtggactgtttggtagaacagggcgtaacacatgtttttggtatcccaggtgcaaaaatcgacgccgtgtttgatgcattacaagacaagggtccagaaattattgttgctagacatgagcaaaatgccgcatttatggcgcaagctgtaggtaggcttacaggtaaacctggtgttgtcctagttacgtctggcccaggagcctccaatttagcaactggtctattgacagctaatactgagggagatcctgtagttgcgttagccggtaatgtaattagagctgataggcttaagagaactcaccagtctctagacaacgctgctttattccaaccgatcaccaagtactcagtagaggtacaagacgtaaagaatatacctgaagctgtgacaaacgcatttcgtatagcttctgctggtcaggctggtgccgcgtttgtttcttttcctcaagacgttgtcaatgaagtgaccaatactaaaaacgttagagcggttgcagcccctaaactaggtccagccgcagacgacgcaattagcgctgcaattgctaaaattcagacggcgaaactaccagtagtccttgtcggtatgaagggcggaagaccagaagcaataaaagctgttcgtaagttattgaagaaagtccaattacctttcgttgagacttaccaagcagcaggtactttatctagagatttagaggatcagtattttggaaggataggtctatttagaaaccaaccaggagatttactattagaacaagctgatgttgtacttactatcggttatgatcctatagagtatgacccaaagttttggaacataaatggggatagaacaattatacatctagacgagataatcgccgacatcgatcacgcttatcaaccagatttagaactaatcggagatatcccgtcaacaatcaatcatattgaacatgatgctgtaaaggttgagttcgctgaacgtgagcagaaaatcttatctgatctaaagcaatatatgcatgagggtgaacaagttccagcagactggaaatctgaccgtgcacatcctttggaaatcgttaaggaactaagaaatgcggtcgatgatcatgtgactgttacatgtgatatcggttcacatgcaatttggatgtcacgttattttaggagctacgaaccattaactttaatgatatctaacgggatgcaaactctgggggttgcacttccttgggctattggcgctagtttagttaagcccggtgagaaggtggtatcggtatcaggtgatggtggctttctgttttcggctatggaattagaaactgcagtccgtttaaaagctcccattgtgcatattgtctggaatgattctacttacgacatggttgcttttcaacagttgaagaaatacaatagaacttcggctgtagactttggtaacatcgatattgtgaaatatgctgagtcttttggcgcaacaggcctgagggtggaaagtccagatcagttagctgatgtgttgagacaagggatgaatgccgagggaccggtaatcatagatgtgccagttgactactcagacaatattaatttggcttctgataaacttcctaaagagtttggcgagctaatgaagaccaaagccttataaggatccataaaaaacacgctttttcagttcgagtttatcattatcaatactgccatttcaaagaatacgtaaataattaatagtagtgattttcctaactttatttagtcaaaaaattagccttttaattctgctgtaacccgtacatgcccaaaatagggggcgggttacacagaatatataacatcgtaggtgtctgggtgaacagtttattcctggcatccactaaatataatggagcccgctttttaagctggcatccagaaaaaaaaagaatcccagcaccaaaatattgttttcttcaccaaccatcagttcataggtccattctcttagcgcaactacagagaacaggggcacaaacaggcaaaaaacgggcacaacctcaatggagtgatgcaacctgcctggagtaaatgatgacacaaggcaattgacccacgcatgtatctatctcattttcttacaccttctattaccttctgctctctctgatttggaaaaagctgaaaaaaaaggttgaaaccagttccctgaaattattcccctacttgactaataagtatataaagacggtaggtattgattgtaattctgtaaatctatttcttaaacttcttaaattctacttttatagttagtcttttttttagttttaaaacaccaagaacttagtttcgaataaacacacataaacaaacaaaaagcttatgtatactgttggagattatttgttagatagattgcatgaactaggcattgaagaaattttcggagttcccggggattacaatctgcaatttctagaccagattatttcacataaagacatgaaatgggtcggaaatgcaaatgagttaaatgcatcttacatggccgatggttatgccagaaccaaaaaggcggctgctttcttgactaccttcggggtgggtgaattatcggcagttaatggcttggctggatcatacgcagaaaacttgcctgtcgttgaaatcgttggctcgccaacatcaaaagttcaaaatgaaggaaaattcgtccaccacactttggcagatggtgacttcaagcacttcatgaaaatgcatgaacctgtaacggctgccagaactctactaactgctgagaatgcaactgtagagattgatcgtgtcttgagcgctcttttaaaggaaagaaagccagtctatattaacctgccagtagacgtcgcagcggccaaagcagagaagcctagcttaccacttaaaaaggaaaatagtacctcaaacacttcagatcaagagattcttaacaagatccaggaatctttgaaaaacgctaaaaagcccattgttataactggccatgagatcatatcatttggtttggagaaaacagtgacccagttcattagtaagacgaaactgccaataaccactctaaatttcggtaagtcctccgttgatgaagcgttgcctagcttcttgggtatttacaacggcaccttgtcagaacccaatctgaaagaatttgttgaatctgcagactttatattgatgttgggagtaaagttgactgacagctctactggtgcttttacacaccatctgaatgaaaacaagatgatatctcttaatatcgatgaaggtaagatattcaatgaaagaatacagaacttcgacttcgagagtctaatttcttccttactggacttaagtgaaatcgagtataaaggtaagtacattgacaaaaagcaggaagattttgttccgagcaacgcgctacttagtcaagatagattatggcaagctgttgaaaatctgacacaatccaatgagacaattgttgccgaacaaggtacctccttttttggcgcttcttccatcttcctaaagtccaagtctcatttcatagggcagccattgtggggtagcatcggttacacctttcctgctgctctagggtcccaaattgctgataaagaaagtagacatttgttgtttataggagacggatctttacaattgacagttcaagagttaggtttagccatcagagagaagattaatcctatctgcttcataataaacaacgatggctatacagttgagagggaaattcatggacctaatcaatcttataatgatataccaatgtggaattatagcaagttacctgaatcttttggggctaccgaggatcgtgttgtttctaagattgtaagaaccgaaaatgaatttgtttctgttatgaaggaagcacaagcggaccctaacaggatgtactggattgagttaattcttgctaaggagggtgcgccaaaggttctaaagaagatgggtaagttgttcgccgaacaaaacaaatccgtgacacatggttataatgtgcagcgatacaatcagttacgtaaaaattttggattttatagagcatattcttcactaagaggttgtaagagcgttttcagacgtatataggctaggtcatgtaattagttatgtcacgcttacattcacgccctccccccacatccgctctaaccgaaaaggaaggagttagacaacctgaagtctaggtccctatttatttttttatagttatgttagtattaagaacgttatttatatttcaaatttttcttttttttctgtacagacgcgtgtacgcatgtaacattatactgaaaaccttgcttgagaaggttttgggacgctcgaaggctttaatttgcgggtgtacaatatggacttcctcttttctggcaaccaaacccatacatcgggattcctataataccttcgttggtctccctaacatgtaggtggcggaggggagatatacaatagaacagataccagacaagacataatgggctaaacaagactacaccaattacactgcctcattgatggtggtacataacgaactaatactgtagccctagacttgatagccatcatcatatcgaagtttcactaccctttttccatttgccatctattgaagtaataataggcgcatgcaacttcttttctttttttttcttttctctctcccccgttgttgtctcaccatatccgcaatgacaaaaaaatgatggaagacactaaaggaaaaaattaacgacaaagacagcaccaacagatgtcgttgttccagagctgatgaggggtatctcgaagcacacgaaactttttccttccttcattcacgcacactactctctaatgagcaacggtatacggccttccttccagttacttgaatttgaaataaaaaaaagtttgctgtcttgctatcaagtataaatagacctgcaattattaatcttttgtttcctcgtcattgttctcgttccctttcttccttgtttctttttctgcacaatatttcaagctataccaagcatacaatcaactatctcatatacacatatgttatatccagagaaattccaaggcattggtatctccaacgcaaaggattggaagcatcctaaacttgttagtttcgaccccaaacctttcggtgaccatgacgttgatgttgagattgaagcatgtggaatatgtgggagcgattttcatattgcagtaggcaattggggccctgttccggaaaatcaaattttgggtcacgaaattattggtagggtagtgaaggtgggttcaaaatgtcacacgggtgttaagattggtgatagggttggtgtaggtgcccaagcattggcttgtttcgaatgcgaaagatgcaaaagtgataacgaacaatactgtaccaacgatcatgttctaacaatgtggactccttacaaagatggatacatatctcaaggtggatttgcatcacatgttagattgcatgagcattttgcaattcaaattccggagaatatcccatcacctttggctgcaccattattgtgtgggggaataacagtgtttagtcctttattgagaaacggttgtggacctggtaagcgtgtggggattgttggcataggtggtattggtcacatggggatattactagctaaggccatgggagccgaagtttatgcgttcagtagaggacactccaagcgtgaagacagtatgaagttaggggcggaccattatattgccatgttggaggataaaggctggaccgaacaatattcaaatgctcttgatctgttagttgtgtgtagttcttctcttagtaaagttaattttgactcgattgtgaaaataatgaagattggcggctccattgtttccattgctgctccagaagttaacgagaagctggtactaaaaccactgggtctgatgggggtatctatctcatcttctgctatcggttcaagaaaagaaatagaacagctattaaagctagtcagcgagaaaaatgtgaagatttgggtagagaagctacccataagcgaggagggtgtatctcacgcatttacgagaatggaatccggagatgttaagtacaggtttacacttgtagactatgacaagaaattccataagtgagcggccgcataacaatactgacagtactaaataattgcctacttggcttcacatacgttgcatacgtcgatatagataataatgataatgacagcaggattatcgtaatacgtaatagttgaaaatctcaaaaatgtgtgggtcattacgtaaataatgataggaatgggattcttctatttttcctttttccattctagcagccgtcgggaaaacgtggcatcctctctttcgggctcaattggagtcacgctgccgtgagcatcctctctttccatatctaacaactgagcacgtaaccaatggaaaagcatgagcttagcgttgctccaaaaaagtattggatggttaataccatttgtctgttctcttctgactttgactcctcaaaaaaaaaaaatctacaatcaacagatcgcttcaattacgccctcacaaaaacttttttccttcttcttcgcccacgttaaattttatccctcatgttgtctaacggatttctgcacttgatttattataaaaagacaaagacataatacttctctatcaatttcagttattgttcttccttgcgttattcttctgttcttctttttcttttgtcatatataaccataaccaagtaatacatattcaaactcgagatgtccaaagctacttataaagaaagggctgcaacccatccatccccagtggcagctaaactgtttaacataatgcacgaaaaacaaactaacttatgcgcatcattagatgtaagaactactaaagagctactggagttggttgaggctttaggtccaaaaatttgtttgttgaagacacatgttgacatattaacagatttttctatggagggtaccgttaagcctctgaaagcgttaagcgcgaaatataactttcttttatttgaagaccgtaagtttgctgatattggaaatactgttaagttgcaatatagcgcaggagtttatagaattgccgaatgggctgacattacgaatgcccacggtgttgtaggtcctggcattgtgtctggattgaaacaagcggcagaggaagtgactaaggaaccaagaggtttactaatgctggcggaattatcttgcaaaggctctctagccaccggtgaatatacaaaaggtactgtggatattgcaaagtctgataaggacttcgtaatcggttttattgcacaaagagatatgggaggtcgtgagaattcaaaatgaagtgaagttcctatactttctagagaataggaacttctatagtgagtcgaataagggcgacacaaaatttattctaaatgcataataaatactgataacatcttatagtttgtattatattttgtattatcgttgacatgtataattttgatatcaaaaactgattttccctttattattttcgagatttattttcttaattctctttaacaaactagaaatattgtatatacaaaaaatcataaataatagatgaatagtttaattataggtgttcatcaatcgaaaaagcaacgtatcttatttaaagtgcgttgcttttttctcatttataaggttaaataattctcatatatcaagcaaagtgacaggcgcccttaaatattctgacaaatgctctttccctaaactccccccataaaaaaacccgccgaagcgggtttttacgttatttgcggattaacgattactcgttatcagaaccgcccagggggcccgagcttaagactggccgtcgttttacaacacagaaagagtttgtagaaacgcaaaaaggccatccgtcaggggccttctgcttagtttgatgcctggcagttccctactctcgccttccgcttcctcgctcactgactcgctgcgctcggtcgttcggctgcggcgagcggtatcagctcactcaaaggcggtaatacggttatccacagaatcaggggataacgcaggaaagaacatgtgagcaaaaggccagcaaaaggccaggaaccgtaaaaaggccgcgttgctggcgtttttccataggctccgcccccctgacgagcatcacaaaaatcgacgctcaagtcagaggtggcgaaacccgacaggactataaagataccaggcgtttccccctggaagctccctcgtgcgctctcctgttccgaccctgccgcttaccggatacctgtccgcctttctcccttcgggaagcgtggcgctttctcatagctcacgctgtaggtatctcagttcggtgtaggtcgttcgctccaagctgggctgtgtgcacgaaccccccgttcagcccgaccgctgcgccttatccggtaactatcgtcttgagtccaacccggtaagacacgacttatcgccactggcagcagccactggtaacaggattagcagagcgaggtatgtaggcggtgctacagagttcttgaagtggtgggctaactacggctacactagaagaacagtatttggtatctgcgctctgctgaagccagttaccttcggaaaaagagttggtagctcttgatccggcaaacaaaccaccgctggtagcggtggtttttttgtttgcaagcagcagattacgcgcagaaaaaaaggatctcaagaagatcctttgatcttttctacggggtctgacgctcagtggaacgacgcgcgcgtaactcacgttaagggattttggtcatgagcttgcgccgtcccgtcaagtcagcgtaatgctctgcttt

SEQ ID NO: 28 - DNA, 11097 bp, Artificial Sequence
  Plasmid pGV6002
tagaaaaactcatcgagcatcaaatgaaactgcaatttattcatatcaggattatcaataccatatttttgaaaaagccgtttctgtaatgaaggagaaaactcaccgaggcagttccataggatggcaagatcctggtatcggtctgcgattccgactcgtccaacatcaatacaacctattaatttcccctcgtcaaaaataaggttatcaagtgagaaatcaccatgagtgacgactgaatccggtgagaatggcaaaagtttatgcatttctttccagacttgttcaacaggccagccattacgctcgtcatcaaaatcactcgcatcaaccaaaccgttattcattcgtgattgcgcctgagcgaggcgaaatacgcgatcgctgttaaaaggacaattacaaacaggaatcgagtgcaaccggcgcaggaacactgccagcgcatcaacaatattttcacctgaatcaggatattcttctaatacctggaacgctgtttttccggggatcgcagtggtgagtaaccatgcatcatcaggagtacggataaaatgcttgatggtcggaagtggcataaattccgtcagccagtttagtctgaccatctcatctgtaacatcattggcaacgctacctttgccatgtttcagaaacaactctggcgcatcgggcttcccatacaagcgatagattgtcgcacctgattgcccgacattatcgcgagcccatttatacccatataaatcagcatccatgttggaatttaatcgcggcctcgacgtttcccgttgaatatggctcatattcttcctttttcaatattattgaagcatttatcagggttattgtctcatgagcggatacatatttgaatgtatttagaaaaataaacaaataggggtcagtgttacaaccaattaaccaattctgaacattatcgcgagcccatttatacctgaatatggctcataacaccccttgtttgcctggcggcagtagcgcggtggtcccacctgaccccatgccgaactcagaagtgaaacgccgtagcgccgatggtagtgtggggactccccatgcgagagtagggaactgccaggcatcaaataaaacgaaaggctcagtcgaaagactgggcctttcgcccgggctaattagggggtgtcgcccttattcgactctatagtgaagttcctattctctagaaagtataggaacttctgaagtggggattcagctgaggtatttctttttacaggattgcgcttccagtaaattcggtctgttccattgcgacttgttgaatggcattggcgatgccaatgcccaattccatgggcaacgagtaagtaagtctcttctacatcgtcctattcctttcctaatgtgagctctttttaccttttggtacccatacaacgagtgtcatggggagaggaagaggaagattttagatgtagtgaaagtgaatagatgaaatgggaaatgggcgtgtggtgcggtttctgtggtatagaaaatcggaaatgagagtcaaccaaggtaaaaggtgggataatttcatggtattggaaattattcaaattagctaaccattgctggcccttgtgcgtgtcctgtattttgcatattctgtatttgctatgtagaaccatgggatagattatgcaatatttgtgaaaagattcaaccttttaaggtgtatacgtagtattggcccatgaatatcttaaggttggaatagtagtaccacttgtgtcaattatccattaaggggggagagtgaggtgagaggcagggctggctgggtggtgaatatgacctttctattttttttagttaactcagataaagtataaatacatgggcatgattatctgtaatggctagagtttcccatcatgtcttaatcataatcttaattatatacttttgattacctcaaaaaccatccactaaagccaaacatattatagtattaactattaatattaaggataaaactacaactcaaaaccaacttaaattacagtcgagatgctttcactacgtcaatctataagatttttcaagccagccacaagaactttgtgtagctctagatatctgcttcagcaaaaacccgtggtgatgttgactaaagctacaaaagagcagaaatcattggtgaaaaataggggtgcagaacttgttgtggactgtttggtagaacagggcgtaacacatgtttttggtatcccaggtgcaaaaatcgacgccgtgtttgatgcattacaagacaagggtccagaaattattgttgctagacatgagcaaaatgccgcatttatggcgcaagctgtaggtaggcttacaggtaaacctggtgttgtcctagttacgtctggcccaggagcctccaatttagcaactggtctattgacagctaatactgagggagatcctgtagttgcgttagccggtaatgtaattagagctgataggcttaagagaactcaccagtctctagacaacgctgctttattccaaccgatcaccaagtactcagtagaggtacaagacgtaaagaatatacctgaagctgtgacaaacgcatttcgtatagcttctgctggtcaggctggtgccgcgtttgtttcttttcctcaagacgttgtcaatgaagtgaccaatactaaaaacgttagagcggttgcagcccctaaactaggtccagccgcagacgacgcaattagcgctgcaattgctaaaattcagacggcgaaactaccagtagtccttgtcggtatgaagggcggaagaccagaagcaataaaagctgttcgtaagttattgaagaaagtccaattacctttcgttgagacttaccaagcagcaggtactttatctagagatttagaggatcagtattttggaaggataggtctatttagaaaccaaccaggagatttactattagaacaagctgatgttgtacttactatcggttatgatcctatagagtatgacccaaagttttggaacataaatggggatagaacaattatacatctagacgagataatcgccgacatcgatcacgcttatcaaccagatttagaactaatcggagatatcccgtcaacaatcaatcatattgaacatgatgctgtaaaggttgagttcgctgaacgtgagcagaaaatcttatctgatctaaagcaatatatgcatgagggtgaacaagttccagcagactggaaatctgaccgtgcacatcctttggaaatcgttaaggaactaagaaatgcggtcgatgatcatgtgactgttacatgtgatatcggttcacatgcaatttggatgtcacgttattttaggagctacgaaccattaactttaatgatatctaacgggatgcaaactctgggggttgcacttccttgggctattggcgctagtttagttaagcccggtgagaaggtggtatcggtatcaggtgatggtggctttctgttttcggctatggaattagaaactgcagtccgtttaaaagctcccattgtgcatattgtctggaatgattctacttacgacatggttgcttttcaacagttgaagaaatacaatagaacttcggctgtagactttggtaacatcgatattgtgaaatatgctgagtcttttggcgcaacaggcctgagggtggaaagtccagatcagttagctgatgtgttgagacaagggatgaatgccgagggaccggtaatcatagatgtgccagttgactactcagacaatattaatttggcttctgataaacttcctaaagagtttggcgagctaatgaagaccaaagccttataaggatccataaaaaacacgctttttcagttcgagtttatcattatcaatactgccatttcaaagaatacgtaaataattaatagtagtgattttcctaactttatttagtcaaaaaattagccttttaattctgctgtaacccgtacatgcccaaaatagggggcgggttacacagaatatataacatcgtaggtgtctgggtgaacagtttattcctggcatccactaaatataatggagcccgctttttaagctggcatccagaaaaaaaaagaatcccagcaccaaaatattgttttcttcaccaaccatcagttcataggtccattctcttagcgcaactacagagaacaggggcacaaacaggcaaaaaacgggcacaacctcaatggagtgatgcaacctgcctggagtaaatgatgacacaaggcaattgacccacgcatgtatctatctcattttcttacaccttctattaccttctgctctctctgatttggaaaaagctgaaaaaaaaggttgaaaccagttccctgaaattattcccctacttgactaataagtatataaagacggtaggtattgattgtaattctgtaaatctatttcttaaacttcttaaattctacttttatagttagtcttttttttagttttaaaacaccaagaacttagtttcgaataaacacacataaacaaacaaaaagcttatgtatactgttggagattatttgttagatagattgcatgaactaggcattgaagaaattttcggagttcccggggattacaatctgcaatttctagaccagattatttcacataaagacatgaaatgggtcggaaatgcaaatgagttaaatgcatcttacatggccgatggttatgccagaaccaaaaaggcggctgctttcttgactaccttcggggtgggtgaattatcggcagttaatggcttggctggatcatacgcagaaaacttgcctgtcgttgaaatcgttggctcgccaacatcaaaagttcaaaatgaaggaaaattcgtccaccacactttggcagatggtgacttcaagcacttcatgaaaatgcatgaacctgtaacggctgccagaactctactaactgctgagaatgcaactgtagagattgatcgtgtcttgagcgctcttttaaaggaaagaaagccagtctatattaacctgccagtagacgtcgcagcggccaaagcagagaagcctagcttaccacttaaaaaggaaaatagtacctcaaacacttcagatcaagagattcttaacaagatccaggaatctttgaaaaacgctaaaaagcccattgttataactggccatgagatcatatcatttggtttggagaaaacagtgacccagttcattagtaagacgaaactgccaataaccactctaaatttcggtaagtcctccgttgatgaagcgttgcctagcttcttgggtatttacaacggcaccttgtcagaacccaatctgaaagaatttgttgaatctgcagactttatattgatgttgggagtaaagttgactgacagctctactggtgcttttacacaccatctgaatgaaaacaagatgatatctcttaatatcgatgaaggtaagatattcaatgaaagaatacagaacttcgacttcgagagtctaatttcttccttactggacttaagtgaaatcgagtataaaggtaagtacattgacaaaaagcaggaagattttgttccgagcaacgcgctacttagtcaagatagattatggcaagctgttgaaaatctgacacaatccaatgagacaattgttgccgaacaaggtacctccttttttggcgcttcttccatcttcctaaagtccaagtctcatttcatagggcagccattgtggggtagcatcggttacacctttcctgctgctctagggtcccaaattgctgataaagaaagtagacatttgttgtttataggagacggatctttacaattgacagttcaagagttaggtttagccatcagagagaagattaatcctatctgcttcataataaacaacgatggctatacagttgagagggaaattcatggacctaatcaatcttataatgatataccaatgtggaattatagcaagttacctgaatcttttggggctaccgaggatcgtgttgtttctaagattgtaagaaccgaaaatgaatttgtttctgttatgaaggaagcacaagcggaccctaacaggatgtactggattgagttaattcttgctaaggagggtgcgccaaaggttctaaagaagatgggtaagttgttcgccgaacaaaacaaatccgtgacacatggttataatgtgcagcgatacaatcagttacgtaaaaattttggattttatagagcatattcttcactaagaggttgtaagagcgttttcagacgtatataggctaggtcatgtaattagttatgtcacgcttacattcacgccctccccccacatccgctctaaccgaaaaggaaggagttagacaacctgaagtctaggtccctatttatttttttatagttatgttagtattaagaacgttatttatatttcaaatttttcttttttttctgtacagacgcgtgtacgcatgtaacattatactgaaaaccttgcttgagaaggttttgggacgctcgaaggctttaatttgcgggtgtacaatatggacttcctcttttctggcaaccaaacccatacatcgggattcctataataccttcgttggtctccctaacatgtaggtggcggaggggagatatacaatagaacagataccagacaagacataatgggctaaacaagactacaccaattacactgcctcattgatggtggtacataacgaactaatactgtagccctagacttgatagccatcatcatatcgaagtttcactaccctttttccatttgccatctattgaagtaataataggcgcatgcaacttcttttctttttttttcttttctctctcccccgttgttgtctcaccatatccgcaatgacaaaaaaatgatggaagacactaaaggaaaaaattaacgacaaagacagcaccaacagatgtcgttgttccagagctgatgaggggtatctcgaagcacacgaaactttttccttccttcattcacgcacactactctctaatgagcaacggtatacggccttccttccagttacttgaatttgaaataaaaaaaagtttgctgtcttgctatcaagtataaatagacctgcaattattaatcttttgtttcctcgtcattgttctcgttccctttcttccttgtttctttttctgcacaatatttcaagctataccaagcatacaatcaactatctcatatacacatatgttatatccagagaaattccaaggcattggtatctccaacgcaaaggattggaagcatcctaaacttgttagtttcgaccccaaacctttcggtgaccatgacgttgatgttgagattgaagcatgtggaatatgtgggagcgattttcatattgcagtaggcaattggggccctgttccggaaaatcaaattttgggtcacgaaattattggtagggtagtgaaggtgggttcaaaatgtcacacgggtgttaagattggtgatagggttggtgtaggtgcccaagcattggcttgtttcgaatgcgaaagatgcaaaagtgataacgaacaatactgtaccaacgatcatgttctaacaatgtggactccttacaaagatggatacatatctcaaggtggatttgcatcacatgttagattgcatgagcattttgcaattcaaattccggagaatatcccatcacctttggctgcaccattattgtgtgggggaataacagtgtttagtcctttattgagaaacggttgtggacctggtaagcgtgtggggattgttggcataggtggtattggtcacatggggatattactagctaaggccatgggagccgaagtttatgcgttcagtagaggacactccaagcgtgaagacagtatgaagttaggggcggaccattatattgccatgttggaggataaaggctggaccgaacaatattcaaatgctcttgatctgttagttgtgtgtagttcttctcttagtaaagttaattttgactcgattgtgaaaataatgaagattggcggctccattgtttccattgctgctccagaagttaacgagaagctggtactaaaaccactgggtctgatgggggtatctatctcatcttctgctatcggttcaagaaaagaaatagaacagctattaaagctagtcagcgagaaaaatgtgaagatttgggtagagaagctacccataagcgaggagggtgtatctcacgcatttacgagaatggaatccggagatgttaagtacaggtttacacttgtagactatgacaagaaattccataagtgagcggccgcataacaatactgacagtactaaataattgcctacttggcttcacatacgttgcatacgtcgatatagataataatgataatgacagcaggattatcgtaatacgtaatagttgaaaatctcaaaaatgtgtgggtcattacgtaaataatgataggaatgggattcttctatttttcctttttccattctagcagccgtcgggaaaacgtggcatcctctctttcgggctcaattggagtcacgctgccgtgagcatcctctctttccatatctaacaactgagcacgtaaccaatggaaaagcatgagcttagcgttgctccaaaaaagtattggatggttaataccatttgtctgttctcttctgactttgactcctcaaaaaaaaaaaatctacaatcaacagatcgcttcaattacgccctcacaaaaacttttttccttcttcttcgcccacgttaaattttatccctcatgttgtctaacggatttctgcacttgatttattataaaaagacaaagacataatacttctctatcaatttcagttattgttcttccttgcgttattcttctgttcttctttttcttttgtcatatataaccataaccaagtaatacatattcaaactcgagatgtccaaagctacttataaagaaagggctgcaacccatccatccccagtggcagctaaactgtttaacataatgcacgaaaaacaaactaacttatgcgcatcattagatgtaagaactactaaagagctactggagttggttgaggctttaggtccaaaaatttgtttgttgaagacacatgttgacatattaacagatttttctatggagggtaccgttaagcctctgaaagcgttaagcgcgaaatataactttcttttatttgaagaccgtaagtttgctgatattggaaatactgttaagttgcaatatagcgcaggagtttatagaattgccgaatgggctgacattacgaatgcccacggtgttgtaggtcctggcattgtgtctggattgaaacaagcggcagaggaagtgactaaggaaccaagaggtttactaatgctggcggaattatcttgcaaaggctctctagccaccggtgaatatacaaaaggtactgtggatattgcaaagtctgataaggacttcgtaatcggttttattgcacaaagagatatgggaggtcgtgagaattcaaaatgaagtgaagttcctatactttctagagaataggaacttctatagtgagtcgaataagggcgacacaaaatttattctaaatgcataataaatactgataacatcttatagtttgtattatattttgtattatcgttgacatgtataattttgatatcaaaaactgattttccctttattattttcgagatttattttcttaattctctttaacaaactagaaatattgtatatacaaaaaatcataaataatagatgaatagtttaattataggtgttcatcaatcgaaaaagcaacgtatcttatttaaagtgcgttgcttttttctcatttataaggttaaataattctcatatatcaagcaaagtgacaggcgcccttaaatattctgacaaatgctctttccctaaactccccccataaaaaaacccgccgaagcgggtttttacgttatttgcggattaacgattactcgttatcagaaccgcccagggggcccgagcttaagactggccgtcgttttacaacacagaaagagtttgtagaaacgcaaaaaggccatccgtcaggggccttctgcttagtttgatgcctggcagttccctactctcgccttccgcttcctcgctcactgactcgctgcgctcggtcgttcggctgcggcgagcggtatcagctcactcaaaggcggtaatacggttatccacagaatcaggggataacgcaggaaagaacatgtgagcaaaaggccagcaaaaggccaggaaccgtaaaaaggccgcgttgctggcgtttttccataggctccgcccccctgacgagcatcacaaaaatcgacgctcaagtcagaggtggcgaaacccgacaggactataaagataccaggcgtttccccctggaagctccctcgtgcgctctcctgttccgaccctgccgcttaccggatacctgtccgcctttctcccttcgggaagcgtggcgctttctcatagctcacgctgtaggtatctcagttcggtgtaggtcgttcgctccaagctgggctgtgtgcacgaaccccccgttcagcccgaccgctgcgccttatccggtaactatcgtcttgagtccaacccggtaagacacgacttatcgccactggcagcagccactggtaacaggattagcagagcgaggtatgtaggcggtgctacagagttcttgaagtggtgggctaactacggctacactagaagaacagtatttggtatctgcgctctgctgaagccagttaccttcggaaaaagagttggtagctcttgatccggcaaacaaaccaccgctggtagcggtggtttttttgtttgcaagcagcagattacgcgcagaaaaaaaggatctcaagaagatcctttgatcttttctacggggtctgacgctcagtggaacgacgcgcgcgtaactcacgttaagggattttggtcatgagcttgcgccgtcccgtcaagtcagcgtaatgctctgcttt

SEQ ID NO: 29 - DNA, 11340 bp, Artificial Sequence
  Plasmid pGV6003
tagaaaaactcatcgagcatcaaatgaaactgcaatttattcatatcaggattatcaataccatatttttgaaaaagccgtttctgtaatgaaggagaaaactcaccgaggcagttccataggatggcaagatcctggtatcggtctgcgattccgactcgtccaacatcaatacaacctattaatttcccctcgtcaaaaataaggttatcaagtgagaaatcaccatgagtgacgactgaatccggtgagaatggcaaaagtttatgcatttctttccagacttgttcaacaggccagccattacgctcgtcatcaaaatcactcgcatcaaccaaaccgttattcattcgtgattgcgcctgagcgaggcgaaatacgcgatcgctgttaaaaggacaattacaaacaggaatcgagtgcaaccggcgcaggaacactgccagcgcatcaacaatattttcacctgaatcaggatattcttctaatacctggaacgctgtttttccggggatcgcagtggtgagtaaccatgcatcatcaggagtacggataaaatgcttgatggtcggaagtggcataaattccgtcagccagtttagtctgaccatctcatctgtaacatcattggcaacgctacctttgccatgtttcagaaacaactctggcgcatcgggcttcccatacaagcgatagattgtcgcacctgattgcccgacattatcgcgagcccatttatacccatataaatcagcatccatgttggaatttaatcgcggcctcgacgtttcccgttgaatatggctcatattcttcctttttcaatattattgaagcatttatcagggttattgtctcatgagcggatacatatttgaatgtatttagaaaaataaacaaataggggtcagtgttacaaccaattaaccaattctgaacattatcgcgagcccatttatacctgaatatggctcataacaccccttgtttgcctggcggcagtagcgcggtggtcccacctgaccccatgccgaactcagaagtgaaacgccgtagcgccgatggtagtgtggggactccccatgcgagagtagggaactgccaggcatcaaataaaacgaaaggctcagtcgaaagactgggcctttcgcccgggctaattagggggtgtcgcccttattcgactctatagtgaagttcctattctctagaaagtataggaacttctgaagtggggattcagctgaggtatttctttttacaggattgcgcttccagtaaattcggtctgttccattgcgacttgttgaatggcattggcgatgccaatgcccaattccatgggcaacgagtaagtaagtctcttctacatcgtcctattcctttcctaatgtgagctctttttaccttttggtacccatacaacgagtgtcatggggagaggaagaggaagattttagatgtagtgaaagtgaatagatgaaatgggaaatgggcgtgtggtgcggtttctgtggtatagaaaatcggaaatgagagtcaaccaaggtaaaaggtgggataatttcatggtattggaaattattcaaattagctaaccattgctggcccttgtgcgtgtcctgtattttgcatattctgtatttgctatgtagaaccatgggatagattatgcaatatttgtgaaaagattcaaccttttaaggtgtatacgtagtattggcccatgaatatcttaaggttggaatagtagtaccacttgtgtcaattatccattaaggggggagagtgaggtgagaggcagggctggctgggtggtgaatatgacctttctattttttttagttaactcagataaagtataaatacatgggcatgattatctgtaatggctagagtttcccatcatgtcttaatcataatcttaattatatacttttgattacctcaaaaaccatccactaaagccaaacatattatagtattaactattaatattaaggataaaactacaactcaaaaccaacttaaattacagtcgagatgctttcactacgtcaatctataagatttttcaagccagccacaagaactttgtgtagctctagatatctgcttatgttgactaaagctacaaaagagcagaaatcattggtgaaaaataggggtgcagaacttgttgtggactgtttggtagaacagggcgtaacacatgtttttggtatcccaggtgcaaaaatcgacgccgtgtttgatgcattacaagacaagggtccagaaattattgttgctagacatgagcaaaatgccgcatttatggcgcaagctgtaggtaggcttacaggtaaacctggtgttgtcctagttacgtctggcccaggagcctccaatttagcaactggtctattgacagctaatactgagggagatcctgtagttgcgttagccggtaatgtaattagagctgataggcttaagagaactcaccagtctctagacaacgctgctttattccaaccgatcaccaagtactcagtagaggtacaagacgtaaagaatatacctgaagctgtgacaaacgcatttcgtatagcttctgctggtcaggctggtgccgcgtttgtttcttttcctcaagacgttgtcaatgaagtgaccaatactaaaaacgttagagcggttgcagcccctaaactaggtccagccgcagacgacgcaattagcgctgcaattgctaaaattcagacggcgaaactaccagtagtccttgtcggtatgaagggcggaagaccagaagcaataaaagctgttcgtaagttattgaagaaagtccaattacctttcgttgagacttaccaagcagcaggtactttatctagagatttagaggatcagtattttggaaggataggtctatttagaaaccaaccaggagatttactattagaacaagctgatgttgtacttactatcggttatgatcctatagagtatgacccaaagttttggaacataaatggggatagaacaattatacatctagacgagataatcgccgacatcgatcacgcttatcaaccagatttagaactaatcggagatatcccgtcaacaatcaatcatattgaacatgatgctgtaaaggttgagttcgctgaacgtgagcagaaaatcttatctgatctaaagcaatatatgcatgagggtgaacaagttccagcagactggaaatctgaccgtgcacatcctttggaaatcgttaaggaactaagaaatgcggtcgatgatcatgtgactgttacatgtgatatcggttcacatgcaatttggatgtcacgttattttaggagctacgaaccattaactttaatgatatctaacgggatgcaaactctgggggttgcacttccttgggctattggcgctagtttagttaagcccggtgagaaggtggtatcggtatcaggtgatggtggctttctgttttcggctatggaattagaaactgcagtccgtttaaaagctcccattgtgcatattgtctggaatgattctacttacgacatggttgcttttcaacagttgaagaaatacaatagaacttcggctgtagactttggtaacatcgatattgtgaaatatgctgagtcttttggcgcaacaggcctgagggtggaaagtccagatcagttagctgatgtgttgagacaagggatgaatgccgagggaccggtaatcatagatgtgccagttgactactcagacaatattaatttggcttctgataaacttcctaaagagtttggcgagctaatgaagaccaaagccttataaggatccataaaaaacacgctttttcagttcgagtttatcattatcaatactgccatttcaaagaatacgtaaataattaatagtagtgattttcctaactttatttagtcaaaaaattagccttttaattctgctgtaacccgtacatgcccaaaatagggggcgggttacacagaatatataacatcgtaggtgtctgggtgaacagtttattcctggcatccactaaatataatggagcccgctttttaagctggcatccagaaaaaaaaagaatcccagcaccaaaatattgttttcttcaccaaccatcagttcataggtccattctcttagcgcaactacagagaacaggggcacaaacaggcaaaaaacgggcacaacctcaatggagtgatgcaacctgcctggagtaaatgatgacacaaggcaattgacccacgcatgtatctatctcattttcttacaccttctattaccttctgctctctctgatttggaaaaagctgaaaaaaaaggttgaaaccagttccctgaaattattcccctacttgactaataagtatataaagacggtaggtattgattgtaattctgtaaatctatttcttaaacttcttaaattctacttttatagttagtcttttttttagttttaaaacaccaagaacttagtttcgaataaacacacataaacaaacaaaaagcttatggcacctgttacaattgaaaagttcgtaaatcaagaagaacgacaccttgtttccaaccgatcagcaacaattccgtttggtgaatacatatttaaaagattgttgtccatcgatacgaaatcagttttcggtgttcctggtgacttcaacttatctctattagaatatctctattcacctagtgttgaatcagctggcctaagatgggtcggcacgtgtaatgaactgaacgccgcttatgcggccgacggatattcccgttactctaataagattggctgtttaataaccacgtatggcgttggtgaattaagcgccttgaacggtatagccggttcgttcgctgaaaatgtcaaagttttgcacattgttggtgtggccaagtccatagattcgcgttcaagtaactttagtgatcggaacctacatcatttggtcccacagctacatgattcaaattttaaagggccaaatcataaagtatatcatgatatggtaaaagatagagtcgcttgctcggtagcctacttggaggatattgaaactgcatgtgaccaagtcgataatgttatccgcgatatttacaagtattctaaacctggttatatttttgttcctgcagattttgcggatatgtctgttacatgtgataatttggttaatgttccacgtatatctcaacaagattgtatagtatacccttctgaaaaccaattgtctgacataatcaacaagattactagttggatatattccagtaaaacacctgcgatccttggagacgtactgactgataggtatggtgtgagtaactttttgaacaagcttatctgcaaaactgggatttggaatttttccactgttatgggaaaatctgtaattgatgagtcaaacccaacttatatgggtcaatataatggtaaagaaggtttaaaacaagtctatgaacattttgaactgtgcgacttggtcttgcattttggagtcgacatcaatgaaattaataatgggcattatacttttacttataaaccaaatgctaaaatcattcaatttcatccgaattatattcgccttgtggacactaggcagggcaatgagcaaatgttcaaaggaatcaattttgcccctattttaaaagaactatacaagcgcattgacgtttctaaactttctttgcaatatgattcaaatgtaactcaatatacgaacgaaacaatgcggttagaagatcctaccaatggacaatcaagcattattacacaagttcacttacaaaagacgatgcctaaatttttgaaccctggtgatgttgtcgtttgtgaaacaggctcttttcaattctctgttcgtgatttcgcgtttccttcgcaattaaaatatatatcgcaaggatttttcctttccattggcatggcccttcctgccgccctaggtgttggaattgccatgcaagaccactcaaacgctcacatcaatggtggcaacgtaaaagaggactataagccaagattaattttgtttgaaggtgacggtgcagcacagatgacaatccaagaactgagcaccattctgaagtgcaatattccactagaagttatcatttggaacaataacggctacactattgaaagagccatcatgggccctaccaggtcgtataacgacgttatgtcttggaaatggaccaaactatttgaagcattcggagacttcgacggaaagtatactaatagcactctcattcaatgtccctctaaattagcactgaaattggaggagcttaagaattcaaacaaaagaagcgggatagaacttttagaagtcaaattaggcgaattggatttccccgaacagctaaagtgcatggttgaagcagcggcacttaaaagaaataaaaaagtgacacatggttataatgtgcagcgatacaatcagttacgtaaaaattttggattttatagagcatattcttcactaagaggttgtaagagcgttttcagacgtatataggctaggtcatgtaattagttatgtcacgcttacattcacgccctccccccacatccgctctaaccgaaaaggaaggagttagacaacctgaagtctaggtccctatttatttttttatagttatgttagtattaagaacgttatttatatttcaaatttttcttttttttctgtacagacgcgtgtacgcatgtaacattatactgaaaaccttgcttgagaaggttttgggacgctcgaaggctttaatttgcgggtgtacaatatggacttcctcttttctggcaaccaaacccatacatcgggattcctataataccttcgttggtctccctaacatgtaggtggcggaggggagatatacaatagaacagataccagacaagacataatgggctaaacaagactacaccaattacactgcctcattgatggtggtacataacgaactaatactgtagccctagacttgatagccatcatcatatcgaagtttcactaccctttttccatttgccatctattgaagtaataataggcgcatgcaacttcttttctttttttttcttttctctctcccccgttgttgtctcaccatatccgcaatgacaaaaaaatgatggaagacactaaaggaaaaaattaacgacaaagacagcaccaacagatgtcgttgttccagagctgatgaggggtatctcgaagcacacgaaactttttccttccttcattcacgcacactactctctaatgagcaacggtatacggccttccttccagttacttgaatttgaaataaaaaaaagtttgctgtcttgctatcaagtataaatagacctgcaattattaatcttttgtttcctcgtcattgttctcgttccctttcttccttgtttctttttctgcacaatatttcaagctataccaagcatacaatcaactatctcatatacacatatgttatatccagagaaattccaaggcattggtatctccaacgcaaaggattggaagcatcctaaacttgttagtttcgaccccaaacctttcggtgaccatgacgttgatgttgagattgaagcatgtggaatatgtgggagcgattttcatattgcagtaggcaattggggccctgttccggaaaatcaaattttgggtcacgaaattattggtagggtagtgaaggtgggttcaaaatgtcacacgggtgttaagattggtgatagggttggtgtaggtgcccaagcattggcttgtttcgaatgcgaaagatgcaaaagtgataacgaacaatactgtaccaacgatcatgttctaacaatgtggactccttacaaagatggatacatatctcaaggtggatttgcatcacatgttagattgcatgagcattttgcaattcaaattccggagaatatcccatcacctttggctgcaccattattgtgtgggggaataacagtgtttagtcctttattgagaaacggttgtggacctggtaagcgtgtggggattgttggcataggtggtattggtcacatggggatattactagctaaggccatgggagccgaagtttatgcgttcagtagaggacactccaagcgtgaagacagtatgaagttaggggcggaccattatattgccatgttggaggataaaggctggaccgaacaatattcaaatgctcttgatctgttagttgtgtgtagttcttctcttagtaaagttaattttgactcgattgtgaaaataatgaagattggcggctccattgtttccattgctgctccagaagttaacgagaagctggtactaaaaccactgggtctgatgggggtatctatctcatcttctgctatcggttcaagaaaagaaatagaacagctattaaagctagtcagcgagaaaaatgtgaagatttgggtagagaagctacccataagcgaggagggtgtatctcacgcatttacgagaatggaatccggagatgttaagtacaggtttacacttgtagactatgacaagaaattccataagtgagcggccgcataacaatactgacagtactaaataattgcctacttggcttcacatacgttgcatacgtcgatatagataataatgataatgacagcaggattatcgtaatacgtaatagttgaaaatctcaaaaatgtgtgggtcattacgtaaataatgataggaatgggattcttctatttttcctttttccattctagcagccgtcgggaaaacgtggcatcctctctttcgggctcaattggagtcacgctgccgtgagcatcctctctttccatatctaacaactgagcacgtaaccaatggaaaagcatgagcttagcgttgctccaaaaaagtattggatggttaataccatttgtctgttctcttctgactttgactcctcaaaaaaaaaaaatctacaatcaacagatcgcttcaattacgccctcacaaaaacttttttccttcttcttcgcccacgttaaattttatccctcatgttgtctaacggatttctgcacttgatttattataaaaagacaaagacataatacttctctatcaatttcagttattgttcttccttgcgttattcttctgttcttctttttcttttgtcatatataaccataaccaagtaatacatattcaaactcgagatgtccaaagctacttataaagaaagggctgcaacccatccatccccagtggcagctaaactgtttaacataatgcacgaaaaacaaactaacttatgcgcatcattagatgtaagaactactaaagagctactggagttggttgaggctttaggtccaaaaatttgtttgttgaagacacatgttgacatattaacagatttttctatggagggtaccgttaagcctctgaaagcgttaagcgcgaaatataactttcttttatttgaagaccgtaagtttgctgatattggaaatactgttaagttgcaatatagcgcaggagtttatagaattgccgaatgggctgacattacgaatgcccacggtgttgtaggtcctggcattgtgtctggattgaaacaagcggcagaggaagtgactaaggaaccaagaggtttactaatgctggcggaattatcttgcaaaggctctctagccaccggtgaatatacaaaaggtactgtggatattgcaaagtctgataaggacttcgtaatcggttttattgcacaaagagatatgggaggtcgtgagaattcaaaatgaagtgaagttcctatactttctagagaataggaacttctatagtgagtcgaataagggcgacacaaaatttattctaaatgcataataaatactgataacatcttatagtttgtattatattttgtattatcgttgacatgtataattttgatatcaaaaactgattttccctttattattttcgagatttattttcttaattctctttaacaaactagaaatattgtatatacaaaaaatcataaataatagatgaatagtttaattataggtgttcatcaatcgaaaaagcaacgtatcttatttaaagtgcgttgcttttttctcatttataaggttaaataattctcatatatcaagcaaagtgacaggcgcccttaaatattctgacaaatgctctttccctaaactccccccataaaaaaacccgccgaagcgggtttttacgttatttgcggattaacgattactcgttatcagaaccgcccagggggcccgagcttaagactggccgtcgttttacaacacagaaagagtttgtagaaacgcaaaaaggccatccgtcaggggccttctgcttagtttgatgcctggcagttccctactctcgccttccgcttcctcgctcactgactcgctgcgctcggtcgttcggctgcggcgagcggtatcagctcactcaaaggcggtaatacggttatccacagaatcaggggataacgcaggaaagaacatgtgagcaaaaggccagcaaaaggccaggaaccgtaaaaaggccgcgttgctggcgtttttccataggctccgcccccctgacgagcatcacaaaaatcgacgctcaagtcagaggtggcgaaacccgacaggactataaagataccaggcgtttccccctggaagctccctcgtgcgctctcctgttccgaccctgccgcttaccggatacctgtccgcctttctcccttcgggaagcgtggcgctttctcatagctcacgctgtaggtatctcagttcggtgtaggtcgttcgctccaagctgggctgtgtgcacgaaccccccgttcagcccgaccgctgcgccttatccggtaactatcgtcttgagtccaacccggtaagacacgacttatcgccactggcagcagccactggtaacaggattagcagagcgaggtatgtaggcggtgctacagagttcttgaagtggtgggctaactacggctacactagaagaacagtatttggtatctgcgctctgctgaagccagttaccttcggaaaaagagttggtagctcttgatccggcaaacaaaccaccgctggtagcggtggtttttttgtttgcaagcagcagattacgcgcagaaaaaaaggatctcaagaagatcctttgatcttttctacggggtctgacgctcagtggaacgacgcgcgcgtaactcacgttaagggattttggtcatgagcttgcgccgtcccgtcaagtcagcgtaatgctctgcttt

SEQ ID NO: 30 - DNA, 11362 bp, Artificial Sequence
  Plasmid pGV6004
tagaaaaactcatcgagcatcaaatgaaactgcaatttattcatatcaggattatcaataccatatttttgaaaaagccgtttctgtaatgaaggagaaaactcaccgaggcagttccataggatggcaagatcctggtatcggtctgcgattccgactcgtccaacatcaatacaacctattaatttcccctcgtcaaaaataaggttatcaagtgagaaatcaccatgagtgacgactgaatccggtgagaatggcaaaagtttatgcatttctttccagacttgttcaacaggccagccattacgctcgtcatcaaaatcactcgcatcaaccaaaccgttattcattcgtgattgcgcctgagcgaggcgaaatacgcgatcgctgttaaaaggacaattacaaacaggaatcgagtgcaaccggcgcaggaacactgccagcgcatcaacaatattttcacctgaatcaggatattcttctaatacctggaacgctgtttttccggggatcgcagtggtgagtaaccatgcatcatcaggagtacggataaaatgcttgatggtcggaagtggcataaattccgtcagccagtttagtctgaccatctcatctgtaacatcattggcaacgctacctttgccatgtttcagaaacaactctggcgcatcgggcttcccatacaagcgatagattgtcgcacctgattgcccgacattatcgcgagcccatttatacccatataaatcagcatccatgttggaatttaatcgcggcctcgacgtttcccgttgaatatggctcatattcttcctttttcaatattattgaagcatttatcagggttattgtctcatgagcggatacatatttgaatgtatttagaaaaataaacaaataggggtcagtgttacaaccaattaaccaattctgaacattatcgcgagcccatttatacctgaatatggctcataacaccccttgtttgcctggcggcagtagcgcggtggtcccacctgaccccatgccgaactcagaagtgaaacgccgtagcgccgatggtagtgtggggactccccatgcgagagtagggaactgccaggcatcaaataaaacgaaaggctcagtcgaaagactgggcctttcgcccgggctaattagggggtgtcgcccttattcgactctatagtgaagttcctattctctagaaagtataggaacttctgaagtggggattcagctgaggtatttctttttacaggattgcgcttccagtaaattcggtctgttccattgcgacttgttgaatggcattggcgatgccaatgcccaattccatgggcaacgagtaagtaagtctcttctacatcgtcctattcctttcctaatgtgagctctttttaccttttggtacccatacaacgagtgtcatggggagaggaagaggaagattttagatgtagtgaaagtgaatagatgaaatgggaaatgggcgtgtggtgcggtttctgtggtatagaaaatcggaaatgagagtcaaccaaggtaaaaggtgggataatttcatggtattggaaattattcaaattagctaaccattgctggcccttgtgcgtgtcctgtattttgcatattctgtatttgctatgtagaaccatgggatagattatgcaatatttgtgaaaagattcaaccttttaaggtgtatacgtagtattggcccatgaatatcttaaggttggaatagtagtaccacttgtgtcaattatccattaaggggggagagtgaggtgagaggcagggctggctgggtggtgaatatgacctttctattttttttagttaactcagataaagtataaatacatgggcatgattatctgtaatggctagagtttcccatcatgtcttaatcataatcttaattatatacttttgattacctcaaaaaccatccactaaagccaaacatattatagtattaactattaatattaaggataaaactacaactcaaaaccaacttaaattacagtcgagatgctttcactacgtcaatctataagatttttcaagccagccacaagaactttgtgtagctctagatatctgcttcagcaaaaacccgtggtgatgttgactaaagctacaaaagagcagaaatcattggtgaaaaataggggtgcagaacttgttgtggactgtttggtagaacagggcgtaacacatgtttttggtatcccaggtgcaaaaatcgacgccgtgtttgatgcattacaagacaagggtccagaaattattgttgctagacatgagcaaaatgccgcatttatggcgcaagctgtaggtaggcttacaggtaaacctggtgttgtcctagttacgtctggcccaggagcctccaatttagcaactggtctattgacagctaatactgagggagatcctgtagttgcgttagccggtaatgtaattagagctgataggcttaagagaactcaccagtctctagacaacgctgctttattccaaccgatcaccaagtactcagtagaggtacaagacgtaaagaatatacctgaagctgtgacaaacgcatttcgtatagcttctgctggtcaggctggtgccgcgtttgtttcttttcctcaagacgttgtcaatgaagtgaccaatactaaaaacgttagagcggttgcagcccctaaactaggtccagccgcagacgacgcaattagcgctgcaattgctaaaattcagacggcgaaactaccagtagtccttgtcggtatgaagggcggaagaccagaagcaataaaagctgttcgtaagttattgaagaaagtccaattacctttcgttgagacttaccaagcagcaggtactttatctagagatttagaggatcagtattttggaaggataggtctatttagaaaccaaccaggagatttactattagaacaagctgatgttgtacttactatcggttatgatcctatagagtatgacccaaagttttggaacataaatggggatagaacaattatacatctagacgagataatcgccgacatcgatcacgcttatcaaccagatttagaactaatcggagatatcccgtcaacaatcaatcatattgaacatgatgctgtaaaggttgagttcgctgaacgtgagcagaaaatcttatctgatctaaagcaatatatgcatgagggtgaacaagttccagcagactggaaatctgaccgtgcacatcctttggaaatcgttaaggaactaagaaatgcggtcgatgatcatgtgactgttacatgtgatatcggttcacatgcaatttggatgtcacgttattttaggagctacgaaccattaactttaatgatatctaacgggatgcaaactctgggggttgcacttccttgggctattggcgctagtttagttaagcccggtgagaaggtggtatcggtatcaggtgatggtggctttctgttttcggctatggaattagaaactgcagtccgtttaaaagctcccattgtgcatattgtctggaatgattctacttacgacatggttgcttttcaacagttgaagaaatacaatagaacttcggctgtagactttggtaacatcgatattgtgaaatatgctgagtcttttggcgcaacaggcctgagggtggaaagtccagatcagttagctgatgtgttgagacaagggatgaatgccgagggaccggtaatcatagatgtgccagttgactactcagacaatattaatttggcttctgataaacttcctaaagagtttggcgagctaatgaagaccaaagccttataaggatccataaaaaacacgctttttcagttcgagtttatcattatcaatactgccatttcaaagaatacgtaaataattaatagtagtgattttcctaactttatttagtcaaaaaattagccttttaattctgctgtaacccgtacatgcccaaaatagggggcgggttacacagaatatataacatcgtaggtgtctgggtgaacagtttattcctggcatccactaaatataatggagcccgctttttaagctggcatccagaaaaaaaaagaatcccagcaccaaaatattgttttcttcaccaaccatcagttcataggtccattctcttagcgcaactacagagaacaggggcacaaacaggcaaaaaacgggcacaacctcaatggagtgatgcaacctgcctggagtaaatgatgacacaaggcaattgacccacgcatgtatctatctcattttcttacaccttctattaccttctgctctctctgatttggaaaaagctgaaaaaaaaggttgaaaccagttccctgaaattattcccctacttgactaataagtatataaagacggtaggtattgattgtaattctgtaaatctatttcttaaacttcttaaattctacttttatagttagtcttttttttagttttaaaacaccaagaacttagtttcgaataaacacacataaacaaacaaaaagcttatggcacctgttacaattgaaaagttcgtaaatcaagaagaacgacaccttgtttccaaccgatcagcaacaattccgtttggtgaatacatatttaaaagattgttgtccatcgatacgaaatcagttttcggtgttcctggtgacttcaacttatctctattagaatatctctattcacctagtgttgaatcagctggcctaagatgggtcggcacgtgtaatgaactgaacgccgcttatgcggccgacggatattcccgttactctaataagattggctgtttaataaccacgtatggcgttggtgaattaagcgccttgaacggtatagccggttcgttcgctgaaaatgtcaaagttttgcacattgttggtgtggccaagtccatagattcgcgttcaagtaactttagtgatcggaacctacatcatttggtcccacagctacatgattcaaattttaaagggccaaatcataaagtatatcatgatatggtaaaagatagagtcgcttgctcggtagcctacttggaggatattgaaactgcatgtgaccaagtcgataatgttatccgcgatatttacaagtattctaaacctggttatatttttgttcctgcagattttgcggatatgtctgttacatgtgataatttggttaatgttccacgtatatctcaacaagattgtatagtatacccttctgaaaaccaattgtctgacataatcaacaagattactagttggatatattccagtaaaacacctgcgatccttggagacgtactgactgataggtatggtgtgagtaactttttgaacaagcttatctgcaaaactgggatttggaatttttccactgttatgggaaaatctgtaattgatgagtcaaacccaacttatatgggtcaatataatggtaaagaaggtttaaaacaagtctatgaacattttgaactgtgcgacttggtcttgcattttggagtcgacatcaatgaaattaataatgggcattatacttttacttataaaccaaatgctaaaatcattcaatttcatccgaattatattcgccttgtggacactaggcagggcaatgagcaaatgttcaaaggaatcaattttgcccctattttaaaagaactatacaagcgcattgacgtttctaaactttctttgcaatatgattcaaatgtaactcaatatacgaacgaaacaatgcggttagaagatcctaccaatggacaatcaagcattattacacaagttcacttacaaaagacgatgcctaaatttttgaaccctggtgatgttgtcgtttgtgaaacaggctcttttcaattctctgttcgtgatttcgcgtttccttcgcaattaaaatatatatcgcaaggatttttcctttccattggcatggcccttcctgccgccctaggtgttggaattgccatgcaagaccactcaaacgctcacatcaatggtggcaacgtaaaagaggactataagccaagattaattttgtttgaaggtgacggtgcagcacagatgacaatccaagaactgagcaccattctgaagtgcaatattccactagaagttatcatttggaacaataacggctacactattgaaagagccatcatgggccctaccaggtcgtataacgacgttatgtcttggaaatggaccaaactatttgaagcattcggagacttcgacggaaagtatactaatagcactctcattcaatgtccctctaaattagcactgaaattggaggagcttaagaattcaaacaaaagaagcgggatagaacttttagaagtcaaattaggcgaattggatttccccgaacagctaaagtgcatggttgaagcagcggcacttaaaagaaataaaaaagtgacacatggttataatgtgcagcgatacaatcagttacgtaaaaattttggattttatagagcatattcttcactaagaggttgtaagagcgttttcagacgtatataggctagctaggtcatgtaattagttatgtcacgcttacattcacgccctccccccacatccgctctaaccgaaaaggaaggagttagacaacctgaagtctaggtccctatttatttttttatagttatgttagtattaagaacgttatttatatttcaaatttttcttttttttctgtacagacgcgtgtacgcatgtaacattatactgaaaaccttgcttgagaaggttttgggacgctcgaaggctttaatttgcgggtgtacaatatggacttcctcttttctggcaaccaaacccatacatcgggattcctataataccttcgttggtctccctaacatgtaggtggcggaggggagatatacaatagaacagataccagacaagacataatgggctaaacaagactacaccaattacactgcctcattgatggtggtacataacgaactaatactgtagccctagacttgatagccatcatcatatcgaagtttcactaccctttttccatttgccatctattgaagtaataataggcgcatgcaacttcttttctttttttttcttttctctctcccccgttgttgtctcaccatatccgcaatgacaaaaaaatgatggaagacactaaaggaaaaaattaacgacaaagacagcaccaacagatgtcgttgttccagagctgatgaggggtatctcgaagcacacgaaactttttccttccttcattcacgcacactactctctaatgagcaacggtatacggccttccttccagttacttgaatttgaaataaaaaaaagtttgctgtcttgctatcaagtataaatagacctgcaattattaatcttttgtttcctcgtcattgttctcgttccctttcttccttgtttctttttctgcacaatatttcaagctataccaagcatacaatcaactatctcatatacacatatgttatatccagagaaattccaaggcattggtatctccaacgcaaaggattggaagcatcctaaacttgttagtttcgaccccaaacctttcggtgaccatgacgttgatgttgagattgaagcatgtggaatatgtgggagcgattttcatattgcagtaggcaattggggccctgttccggaaaatcaaattttgggtcacgaaattattggtagggtagtgaaggtgggttcaaaatgtcacacgggtgttaagattggtgatagggttggtgtaggtgcccaagcattggcttgtttcgaatgcgaaagatgcaaaagtgataacgaacaatactgtaccaacgatcatgttctaacaatgtggactccttacaaagatggatacatatctcaaggtggatttgcatcacatgttagattgcatgagcattttgcaattcaaattccggagaatatcccatcacctttggctgcaccattattgtgtgggggaataacagtgtttagtcctttattgagaaacggttgtggacctggtaagcgtgtggggattgttggcataggtggtattggtcacatggggatattactagctaaggccatgggagccgaagtttatgcgttcagtagaggacactccaagcgtgaagacagtatgaagttaggggcggaccattatattgccatgttggaggataaaggctggaccgaacaatattcaaatgctcttgatctgttagttgtgtgtagttcttctcttagtaaagttaattttgactcgattgtgaaaataatgaagattggcggctccattgtttccattgctgctccagaagttaacgagaagctggtactaaaaccactgggtctgatgggggtatctatctcatcttctgctatcggttcaagaaaagaaatagaacagctattaaagctagtcagcgagaaaaatgtgaagatttgggtagagaagctacccataagcgaggagggtgtatctcacgcatttacgagaatggaatccggagatgttaagtacaggtttacacttgtagactatgacaagaaattccataagtgagcggccgcataacaatactgacagtactaaataattgcctacttggcttcacatacgttgcatacgtcgatatagataataatgataatgacagcaggattatcgtaatacgtaatagttgaaaatctcaaaaatgtgtgggtcattacgtaaataatgataggaatgggattcttctatttttcctttttccattctagcagccgtcgggaaaacgtggcatcctctctttcgggctcaattggagtcacgctgccgtgagcatcctctctttccatatctaacaactgagcacgtaaccaatggaaaagcatgagcttagcgttgctccaaaaaagtattggatggttaataccatttgtctgttctcttctgactttgactcctcaaaaaaaaaaaatctacaatcaacagatcgcttcaattacgccctcacaaaaacttttttccttcttcttcgcccacgttaaattttatccctcatgttgtctaacggatttctgcacttgatttattataaaaagacaaagacataatacttctctatcaatttcagttattgttcttccttgcgttattcttctgttcttctttttcttttgtcatatataaccataaccaagtaatacatattcaaactcgagatgtccaaagctacttataaagaaagggctgcaacccatccatccccagtggcagctaaactgtttaacataatgcacgaaaaacaaactaacttatgcgcatcattagatgtaagaactactaaagagctactggagttggttgaggctttaggtccaaaaatttgtttgttgaagacacatgttgacatattaacagatttttctatggagggtaccgttaagcctctgaaagcgttaagcgcgaaatataactttcttttatttgaagaccgtaagtttgctgatattggaaatactgttaagttgcaatatagcgcaggagtttatagaattgccgaatgggctgacattacgaatgcccacggtgttgtaggtcctggcattgtgtctggattgaaacaagcggcagaggaagtgactaaggaaccaagaggtttactaatgctggcggaattatcttgcaaaggctctctagccaccggtgaatatacaaaaggtactgtggatattgcaaagtctgataaggacttcgtaatcggttttattgcacaaagagatatgggaggtcgtgagaattcaaaatgaagtgaagttcctatactttctagagaataggaacttctatagtgagtcgaataagggcgacacaaaatttattctaaatgcataataaatactgataacatcttatagtttgtattatattttgtattatcgttgacatgtataattttgatatcaaaaactgattttccctttattattttcgagatttattttcttaattctctttaacaaactagaaatattgtatatacaaaaaatcataaataatagatgaatagtttaattataggtgttcatcaatcgaaaaagcaacgtatcttatttaaagtgcgttgcttttttctcatttataaggttaaataattctcatatatcaagcaaagtgacaggcgcccttaaatattctgacaaatgctctttccctaaactccccccataaaaaaacccgccgaagcgggtttttacgttatttgcggattaacgattactcgttatcagaaccgcccagggggcccgagcttaagactggccgtcgttttacaacacagaaagagtttgtagaaacgcaaaaaggccatccgtcaggggccttctgcttagtttgatgcctggcagttccctactctcgccttccgcttcctcgctcactgactcgctgcgctcggtcgttcggctgcggcgagcggtatcagctcactcaaaggcggtaatacggttatccacagaatcaggggataacgcaggaaagaacatgtgagcaaaaggccagcaaaaggccaggaaccgtaaaaaggccgcgttgctggcgtttttccataggctccgcccccctgacgagcatcacaaaaatcgacgctcaagtcagaggtggcgaaacccgacaggactataaagataccaggcgtttccccctggaagctccctcgtgcgctctcctgttccgaccctgccgcttaccggatacctgtccgcctttctcccttcgggaagcgtggcgctttctcatagctcacgctgtaggtatctcagttcggtgtaggtcgttcgctccaagctgggctgtgtgcacgaaccccccgttcagcccgaccgctgcgccttatccggtaactatcgtcttgagtccaacccggtaagacacgacttatcgccactggcagcagccactggtaacaggattagcagagcgaggtatgtaggcggtgctacagagttcttgaagtggtgggctaactacggctacactagaagaacagtatttggtatctgcgctctgctgaagccagttaccttcggaaaaagagttggtagctcttgatccggcaaacaaaccaccgctggtagcggtggtttttttgtttgcaagcagcagattacgcgcagaaaaaaaggatctcaagaagatcctttgatcttttctacggggtctgacgctcagtggaacgacgcgcgcgtaactcacgttaagggattttggtcatgagcttgcgccgtcccgtcaagtcagcgtaatgctctgcttt

SEQ ID NO: 31 - DNA, 11352 bp, Artificial Sequence
  Plasmid pGV6005
tagaaaaactcatcgagcatcaaatgaaactgcaatttattcatatcaggattatcaataccatatttttgaaaaagccgtttctgtaatgaaggagaaaactcaccgaggcagttccataggatggcaagatcctggtatcggtctgcgattccgactcgtccaacatcaatacaacctattaatttcccctcgtcaaaaataaggttatcaagtgagaaatcaccatgagtgacgactgaatccggtgagaatggcaaaagtttatgcatttctttccagacttgttcaacaggccagccattacgctcgtcatcaaaatcactcgcatcaaccaaaccgttattcattcgtgattgcgcctgagcgaggcgaaatacgcgatcgctgttaaaaggacaattacaaacaggaatcgagtgcaaccggcgcaggaacactgccagcgcatcaacaatattttcacctgaatcaggatattcttctaatacctggaacgctgtttttccggggatcgcagtggtgagtaaccatgcatcatcaggagtacggataaaatgcttgatggtcggaagtggcataaattccgtcagccagtttagtctgaccatctcatctgtaacatcattggcaacgctacctttgccatgtttcagaaacaactctggcgcatcgggcttcccatacaagcgatagattgtcgcacctgattgcccgacattatcgcgagcccatttatacccatataaatcagcatccatgttggaatttaatcgcggcctcgacgtttcccgttgaatatggctcatattcttcctttttcaatattattgaagcatttatcagggttattgtctcatgagcggatacatatttgaatgtatttagaaaaataaacaaataggggtcagtgttacaaccaattaaccaattctgaacattatcgcgagcccatttatacctgaatatggctcataacaccccttgtttgcctggcggcagtagcgcggtggtcccacctgaccccatgccgaactcagaagtgaaacgccgtagcgccgatggtagtgtggggactccccatgcgagagtagggaactgccaggcatcaaataaaacgaaaggctcagtcgaaagactgggcctttcgcccgggctaattagggggtgtcgcccttattcgactctatagtgaagttcctattctctagaaagtataggaacttctgaagtggggattcagctgaggtatttctttttacaggattgcgcttccagtaaattcggtctgttccattgcgacttgttgaatggcattggcgatgccaatgcccaattccatgggcaacgagtaagtaagtctcttctacatcgtcctattcctttcctaatgtgagctctttttaccttttggtacccatacaacgagtgtcatggggagaggaagaggaagattttagatgtagtgaaagtgaatagatgaaatgggaaatgggcgtgtggtgcggtttctgtggtatagaaaatcggaaatgagagtcaaccaaggtaaaaggtgggataatttcatggtattggaaattattcaaattagctaaccattgctggcccttgtgcgtgtcctgtattttgcatattctgtatttgctatgtagaaccatgggatagattatgcaatatttgtgaaaagattcaaccttttaaggtgtatacgtagtattggcccatgaatatcttaaggttggaatagtagtaccacttgtgtcaattatccattaaggggggagagtgaggtgagaggcagggctggctgggtggtgaatatgacctttctattttttttagttaactcagataaagtataaatacatgggcatgattatctgtaatggctagagtttcccatcatgtcttaatcataatcttaattatatacttttgattacctcaaaaaccatccactaaagccaaacatattatagtattaactattaatattaaggataaaactacaactcaaaaccaacttaaattacagtcgagatgatcagacaatctacgctaaaaaacttcgctattaagcgttgctttcaacatatagcataccgcaacacacctgccatgagatcagtagctctcgcgcagcgcttttatagttcgtcttcccgttattacagtgcgtctccattaccagcctctaaaaggccagagcctgctccaagtttcaatgttgatccattagaacagcccgctgaaccttcaaaattggctaagaaactacgcgctgagcctgacatggatacctctttcgtcggtttaactggtggtcaaatatttaacgaaatgatgtccagacaaaacgttgatactgtatttggttatccaggtggtgctatcctacctgtttacgatgccattcataacagtgataaattcaacttcgttcttccaaaacacgaacaaggtgccggtcacatggcagaaggctacgccagagcttctggtaaaccaggtgttgtcttggttacttctgggccaggtgccaccaatgtcgttactccaatggcagatgcctttgcagacgggattccaatggttgtctttacagggcaagtcccaactagtgctatcggtactgatgctttccaagaggctgacgtcgttggtatttctagatcttgtacgaaatggaatgtcatggtcaagtccgtggaagaattgccattgcgtattaacgaggcttttgaaattgccacgagcggtagaccgggaccagtcttggtcgatttaccaaaggatgttacagcagctatcttaagaaatccaattccaacaaaaacaactcttccatcaaacgcactaaaccaattaaccagtcgcgcacaagatgaatttgtcatgcaaagtatcaataaagcagcagatttgatcaacttggcaaagaaacctgtcttatacgtcggtgctggtattttaaaccatgcagatggtccaagattactaaaagaattaagtgaccgtgctcaaatacctgtcaccactactttacaaggtttaggttcattcgaccaagaagatccaaaatcattggatatgcttggtatgcacggttgtgctactgccaacctggcagtgcaaaatgccgacttgataattgcagttggtgctagattcgacgaccgtgtcactggtaatatttctaaattcgctccagaagctcgtcgtgcagctgccgagggtagaggtggtattattcatttcgaggttagtccaaaaaacataaacaaggttgttcaaactcaaatagcagtggaaggtgatgctacgaccaatctgggcaaaatgatgtcaaagattttcccagttaaggagaggtctgaatggtttgctcaaataaataaatggaagaaggaatacccatacgcttatatggaggagactccaggatctaaaattaaaccacagacggttataaagaaactatccaaggttgccaacgacacaggaagacatgtcattgttacaacgggtgtggggcaacatcaaatgtgggctgctcaacactggacatggagaaatccacatactttcatcacatcaggtggtttaggtacgatgggttacggtctccctgccgccatcggtgctcaagttgcaaagccagaatctttggttattgacattgatggtgacgcatcctttaacatgactctaacggaattgagttctgccgttcaagctggtactccagtgaagattttgattttgaacaatgaagagcaaggtatggttactcaatggcaatccctgttctacgaacatcgttattcccacacacatcaattgaaccctgatttcataaaactagcggaggctatgggtttaaaaggtttaagagtcaagaagcaagaggaattggacgctaagttgaaagaattcgtttctaccaagggcccagttttgcttgaagtggaagttgataaaaaagttcctgttttgccaatggtggcaggtggtagcggtctagacgagttcataaattttgacccagaagttgaaagacaacagactgaattacgtcataagcgtacaggcggtaagcactgaggatccataaaaaacacgctttttcagttcgagtttatcattatcaatactgccatttcaaagaatacgtaaataattaatagtagtgattttcctaactttatttagtcaaaaaattagccttttaattctgctgtaacccgtacatgcccaaaatagggggcgggttacacagaatatataacatcgtaggtgtctgggtgaacagtttattcctggcatccactaaatataatggagcccgctttttaagctggcatccagaaaaaaaaagaatcccagcaccaaaatattgttttcttcaccaaccatcagttcataggtccattctcttagcgcaactacagagaacaggggcacaaacaggcaaaaaacgggcacaacctcaatggagtgatgcaacctgcctggagtaaatgatgacacaaggcaattgacccacgcatgtatctatctcattttcttacaccttctattaccttctgctctctctgatttggaaaaagctgaaaaaaaaggttgaaaccagttccctgaaattattcccctacttgactaataagtatataaagacggtaggtattgattgtaattctgtaaatctatttcttaaacttcttaaattctacttttatagttagtcttttttttagttttaaaacaccaagaacttagtttcgaataaacacacataaacaaacaaaaagcttatgtatactgttggagattatttgttagatagattgcatgaactaggcattgaagaaattttcggagttcccggggattacaatctgcaatttctagaccagattatttcacataaagacatgaaatgggtcggaaatgcaaatgagttaaatgcatcttacatggccgatggttatgccagaaccaaaaaggcggctgctttcttgactaccttcggggtgggtgaattatcggcagttaatggcttggctggatcatacgcagaaaacttgcctgtcgttgaaatcgttggctcgccaacatcaaaagttcaaaatgaaggaaaattcgtccaccacactttggcagatggtgacttcaagcacttcatgaaaatgcatgaacctgtaacggctgccagaactctactaactgctgagaatgcaactgtagagattgatcgtgtcttgagcgctcttttaaaggaaagaaagccagtctatattaacctgccagtagacgtcgcagcggccaaagcagagaagcctagcttaccacttaaaaaggaaaatagtacctcaaacacttcagatcaagagattcttaacaagatccaggaatctttgaaaaacgctaaaaagcccattgttataactggccatgagatcatatcatttggtttggagaaaacagtgacccagttcattagtaagacgaaactgccaataaccactctaaatttcggtaagtcctccgttgatgaagcgttgcctagcttcttgggtatttacaacggcaccttgtcagaacccaatctgaaagaatttgttgaatctgcagactttatattgatgttgggagtaaagttgactgacagctctactggtgcttttacacaccatctgaatgaaaacaagatgatatctcttaatatcgatgaaggtaagatattcaatgaaagaatacagaacttcgacttcgagagtctaatttcttccttactggacttaagtgaaatcgagtataaaggtaagtacattgacaaaaagcaggaagattttgttccgagcaacgcgctacttagtcaagatagattatggcaagctgttgaaaatctgacacaatccaatgagacaattgttgccgaacaaggtacctccttttttggcgcttcttccatcttcctaaagtccaagtctcatttcatagggcagccattgtggggtagcatcggttacacctttcctgctgctctagggtcccaaattgctgataaagaaagtagacatttgttgtttataggagacggatctttacaattgacagttcaagagttaggtttagccatcagagagaagattaatcctatctgcttcataataaacaacgatggctatacagttgagagggaaattcatggacctaatcaatcttataatgatataccaatgtggaattatagcaagttacctgaatcttttggggctaccgaggatcgtgttgtttctaagattgtaagaaccgaaaatgaatttgtttctgttatgaaggaagcacaagcggaccctaacaggatgtactggattgagttaattcttgctaaggagggtgcgccaaaggttctaaagaagatgggtaagttgttcgccgaacaaaacaaatccgtgacacatggttataatgtgcagcgatacaatcagttacgtaaaaattttggattttatagagcatattcttcactaagaggttgtaagagcgttttcagacgtatataggctaggtcatgtaattagttatgtcacgcttacattcacgccctccccccacatccgctctaaccgaaaaggaaggagttagacaacctgaagtctaggtccctatttatttttttatagttatgttagtattaagaacgttatttatatttcaaatttttcttttttttctgtacagacgcgtgtacgcatgtaacattatactgaaaaccttgcttgagaaggttttgggacgctcgaaggctttaatttgcgggtgtacaatatggacttcctcttttctggcaaccaaacccatacatcgggattcctataataccttcgttggtctccctaacatgtaggtggcggaggggagatatacaatagaacagataccagacaagacataatgggctaaacaagactacaccaattacactgcctcattgatggtggtacataacgaactaatactgtagccctagacttgatagccatcatcatatcgaagtttcactaccctttttccatttgccatctattgaagtaataataggcgcatgcaacttcttttctttttttttcttttctctctcccccgttgttgtctcaccatatccgcaatgacaaaaaaatgatggaagacactaaaggaaaaaattaacgacaaagacagcaccaacagatgtcgttgttccagagctgatgaggggtatctcgaagcacacgaaactttttccttccttcattcacgcacactactctctaatgagcaacggtatacggccttccttccagttacttgaatttgaaataaaaaaaagtttgctgtcttgctatcaagtataaatagacctgcaattattaatcttttgtttcctcgtcattgttctcgttccctttcttccttgtttctttttctgcacaatatttcaagctataccaagcatacaatcaactatctcatatacacatatgttatatccagagaaattccaaggcattggtatctccaacgcaaaggattggaagcatcctaaacttgttagtttcgaccccaaacctttcggtgaccatgacgttgatgttgagattgaagcatgtggaatatgtgggagcgattttcatattgcagtaggcaattggggccctgttccggaaaatcaaattttgggtcacgaaattattggtagggtagtgaaggtgggttcaaaatgtcacacgggtgttaagattggtgatagggttggtgtaggtgcccaagcattggcttgtttcgaatgcgaaagatgcaaaagtgataacgaacaatactgtaccaacgatcatgttctaacaatgtggactccttacaaagatggatacatatctcaaggtggatttgcatcacatgttagattgcatgagcattttgcaattcaaattccggagaatatcccatcacctttggctgcaccattattgtgtgggggaataacagtgtttagtcctttattgagaaacggttgtggacctggtaagcgtgtggggattgttggcataggtggtattggtcacatggggatattactagctaaggccatgggagccgaagtttatgcgttcagtagaggacactccaagcgtgaagacagtatgaagttaggggcggaccattatattgccatgttggaggataaaggctggaccgaacaatattcaaatgctcttgatctgttagttgtgtgtagttcttctcttagtaaagttaattttgactcgattgtgaaaataatgaagattggcggctccattgtttccattgctgctccagaagttaacgagaagctggtactaaaaccactgggtctgatgggggtatctatctcatcttctgctatcggttcaagaaaagaaatagaacagctattaaagctagtcagcgagaaaaatgtgaagatttgggtagagaagctacccataagcgaggagggtgtatctcacgcatttacgagaatggaatccggagatgttaagtacaggtttacacttgtagactatgacaagaaattccataagtgagcggccgcataacaatactgacagtactaaataattgcctacttggcttcacatacgttgcatacgtcgatatagataataatgataatgacagcaggattatcgtaatacgtaatagttgaaaatctcaaaaatgtgtgggtcattacgtaaataatgataggaatgggattcttctatttttcctttttccattctagcagccgtcgggaaaacgtggcatcctctctttcgggctcaattggagtcacgctgccgtgagcatcctctctttccatatctaacaactgagcacgtaaccaatggaaaagcatgagcttagcgttgctccaaaaaagtattggatggttaataccatttgtctgttctcttctgactttgactcctcaaaaaaaaaaaatctacaatcaacagatcgcttcaattacgccctcacaaaaacttttttccttcttcttcgcccacgttaaattttatccctcatgttgtctaacggatttctgcacttgatttattataaaaagacaaagacataatacttctctatcaatttcagttattgttcttccttgcgttattcttctgttcttctttttcttttgtcatatataaccataaccaagtaatacatattcaaactcgagatgtccaaagctacttataaagaaagggctgcaacccatccatccccagtggcagctaaactgtttaacataatgcacgaaaaacaaactaacttatgcgcatcattagatgtaagaactactaaagagctactggagttggttgaggctttaggtccaaaaatttgtttgttgaagacacatgttgacatattaacagatttttctatggagggtaccgttaagcctctgaaagcgttaagcgcgaaatataactttcttttatttgaagaccgtaagtttgctgatattggaaatactgttaagttgcaatatagcgcaggagtttatagaattgccgaatgggctgacattacgaatgcccacggtgttgtaggtcctggcattgtgtctggattgaaacaagcggcagaggaagtgactaaggaaccaagaggtttactaatgctggcggaattatcttgcaaaggctctctagccaccggtgaatatacaaaaggtactgtggatattgcaaagtctgataaggacttcgtaatcggttttattgcacaaagagatatgggaggtcgtgagaattcaaaatgaagtgaagttcctatactttctagagaataggaacttctatagtgagtcgaataagggcgacacaaaatttattctaaatgcataataaatactgataacatcttatagtttgtattatattttgtattatcgttgacatgtataattttgatatcaaaaactgattttccctttattattttcgagatttattttcttaattctctttaacaaactagaaatattgtatatacaaaaaatcataaataatagatgaatagtttaattataggtgttcatcaatcgaaaaagcaacgtatcttatttaaagtgcgttgcttttttctcatttataaggttaaataattctcatatatcaagcaaagtgacaggcgcccttaaatattctgacaaatgctctttccctaaactccccccataaaaaaacccgccgaagcgggtttttacgttatttgcggattaacgattactcgttatcagaaccgcccagggggcccgagcttaagactggccgtcgttttacaacacagaaagagtttgtagaaacgcaaaaaggccatccgtcaggggccttctgcttagtttgatgcctggcagttccctactctcgccttccgcttcctcgctcactgactcgctgcgctcggtcgttcggctgcggcgagcggtatcagctcactcaaaggcggtaatacggttatccacagaatcaggggataacgcaggaaagaacatgtgagcaaaaggccagcaaaaggccaggaaccgtaaaaaggccgcgttgctggcgtttttccataggctccgcccccctgacgagcatcacaaaaatcgacgctcaagtcagaggtggcgaaacccgacaggactataaagataccaggcgtttccccctggaagctccctcgtgcgctctcctgttccgaccctgccgcttaccggatacctgtccgcctttctcccttcgggaagcgtggcgctttctcatagctcacgctgtaggtatctcagttcggtgtaggtcgttcgctccaagctgggctgtgtgcacgaaccccccgttcagcccgaccgctgcgccttatccggtaactatcgtcttgagtccaacccggtaagacacgacttatcgccactggcagcagccactggtaacaggattagcagagcgaggtatgtaggcggtgctacagagttcttgaagtggtgggctaactacggctacactagaagaacagtatttggtatctgcgctctgctgaagccagttaccttcggaaaaagagttggtagctcttgatccggcaaacaaaccaccgctggtagcggtggtttttttgtttgcaagcagcagattacgcgcagaaaaaaaggatctcaagaagatcctttgatcttttctacggggtctgacgctcagtggaacgacgcgcgcgtaactcacgttaagggattttggtcatgagcttgcgccgtcccgtcaagtcagcgtaatgctctgcttt

SEQ ID NO: 32 - DNA, 11613 bp, Artificial Sequence
  Plasmid pGV6006
tagaaaaactcatcgagcatcaaatgaaactgcaatttattcatatcaggattatcaataccatatttttgaaaaagccgtttctgtaatgaaggagaaaactcaccgaggcagttccataggatggcaagatcctggtatcggtctgcgattccgactcgtccaacatcaatacaacctattaatttcccctcgtcaaaaataaggttatcaagtgagaaatcaccatgagtgacgactgaatccggtgagaatggcaaaagtttatgcatttctttccagacttgttcaacaggccagccattacgctcgtcatcaaaatcactcgcatcaaccaaaccgttattcattcgtgattgcgcctgagcgaggcgaaatacgcgatcgctgttaaaaggacaattacaaacaggaatcgagtgcaaccggcgcaggaacactgccagcgcatcaacaatattttcacctgaatcaggatattcttctaatacctggaacgctgtttttccggggatcgcagtggtgagtaaccatgcatcatcaggagtacggataaaatgcttgatggtcggaagtggcataaattccgtcagccagtttagtctgaccatctcatctgtaacatcattggcaacgctacctttgccatgtttcagaaacaactctggcgcatcgggcttcccatacaagcgatagattgtcgcacctgattgcccgacattatcgcgagcccatttatacccatataaatcagcatccatgttggaatttaatcgcggcctcgacgtttcccgttgaatatggctcatattcttcctttttcaatattattgaagcatttatcagggttattgtctcatgagcggatacatatttgaatgtatttagaaaaataaacaaataggggtcagtgttacaaccaattaaccaattctgaacattatcgcgagcccatttatacctgaatatggctcataacaccccttgtttgcctggcggcagtagcgcggtggtcccacctgaccccatgccgaactcagaagtgaaacgccgtagcgccgatggtagtgtggggactccccatgcgagagtagggaactgccaggcatcaaataaaacgaaaggctcagtcgaaagactgggcctttcgcccgggctaattagggggtgtcgcccttattcgactctatagtgaagttcctattctctagaaagtataggaacttctgaagtggggattcagctgaggtatttctttttacaggattgcgcttccagtaaattcggtctgttccattgcgacttgttgaatggcattggcgatgccaatgcccaattccatgggcaacgagtaagtaagtctcttctacatcgtcctattcctttcctaatgtgagctctttttaccttttggtacccatacaacgagtgtcatggggagaggaagaggaagattttagatgtagtgaaagtgaatagatgaaatgggaaatgggcgtgtggtgcggtttctgtggtatagaaaatcggaaatgagagtcaaccaaggtaaaaggtgggataatttcatggtattggaaattattcaaattagctaaccattgctggcccttgtgcgtgtcctgtattttgcatattctgtatttgctatgtagaaccatgggatagattatgcaatatttgtgaaaagattcaaccttttaaggtgtatacgtagtattggcccatgaatatcttaaggttggaatagtagtaccacttgtgtcaattatccattaaggggggagagtgaggtgagaggcagggctggctgggtggtgaatatgacctttctattttttttagttaactcagataaagtataaatacatgggcatgattatctgtaatggctagagtttcccatcatgtcttaatcataatcttaattatatacttttgattacctcaaaaaccatccactaaagccaaacatattatagtattaactattaatattaaggataaaactacaactcaaaaccaacttaaattacagtcgagatgatcagacaatctacgctaaaaaacttcgctattaagcgttgctttcaacatatagcataccgcaacacacctgccatgagatcagtagctctcgcgcagcgcttttatagttcgtcttcccgttattacagtgcgtctccattaccagcctctaaaaggccagagcctgctccaagtttcaatgttgatccattagaacagcccgctgaaccttcaaaattggctaagaaactacgcgctgagcctgacatggatacctctttcgtcggtttaactggtggtcaaatatttaacgaaatgatgtccagacaaaacgttgatactgtatttggttatccaggtggtgctatcctacctgtttacgatgccattcataacagtgataaattcaacttcgttcttccaaaacacgaacaaggtgccggtcacatggcagaaggctacgccagagcttctggtaaaccaggtgttgtcttggttacttctgggccaggtgccaccaatgtcgttactccaatggcagatgcctttgcagacgggattccaatggttgtctttacagggcaagtcccaactagtgctatcggtactgatgctttccaagaggctgacgtcgttggtatttctagatcttgtacgaaatggaatgtcatggtcaagtccgtggaagaattgccattgcgtattaacgaggcttttgaaattgccacgagcggtagaccgggaccagtcttggtcgatttaccaaaggatgttacagcagctatcttaagaaatccaattccaacaaaaacaactcttccatcaaacgcactaaaccaattaaccagtcgcgcacaagatgaatttgtcatgcaaagtatcaataaagcagcagatttgatcaacttggcaaagaaacctgtcttatacgtcggtgctggtattttaaaccatgcagatggtccaagattactaaaagaattaagtgaccgtgctcaaatacctgtcaccactactttacaaggtttaggttcattcgaccaagaagatccaaaatcattggatatgcttggtatgcacggttgtgctactgccaacctggcagtgcaaaatgccgacttgataattgcagttggtgctagattcgacgaccgtgtcactggtaatatttctaaattcgctccagaagctcgtcgtgcagctgccgagggtagaggtggtattattcatttcgaggttagtccaaaaaacataaacaaggttgttcaaactcaaatagcagtggaaggtgatgctacgaccaatctgggcaaaatgatgtcaaagattttcccagttaaggagaggtctgaatggtttgctcaaataaataaatggaagaaggaatacccatacgcttatatggaggagactccaggatctaaaattaaaccacagacggttataaagaaactatccaaggttgccaacgacacaggaagacatgtcattgttacaacgggtgtggggcaacatcaaatgtgggctgctcaacactggacatggagaaatccacatactttcatcacatcaggtggtttaggtacgatgggttacggtctccctgccgccatcggtgctcaagttgcaaagccagaatctttggttattgacattgatggtgacgcatcctttaacatgactctaacggaattgagttctgccgttcaagctggtactccagtgaagattttgattttgaacaatgaagagcaaggtatggttactcaatggcaatccctgttctacgaacatcgttattcccacacacatcaattgaaccctgatttcataaaactagcggaggctatgggtttaaaaggtttaagagtcaagaagcaagaggaattggacgctaagttgaaagaattcgtttctaccaagggcccagttttgcttgaagtggaagttgataaaaaagttcctgttttgccaatggtggcaggtggtagcggtctagacgagttcataaattttgacccagaagttgaaagacaacagactgaattacgtcataagcgtacaggcggtaagcactgaggatccataaaaaacacgctttttcagttcgagtttatcattatcaatactgccatttcaaagaatacgtaaataattaatagtagtgattttcctaactttatttagtcaaaaaattagccttttaattctgctgtaacccgtacatgcccaaaatagggggcgggttacacagaatatataacatcgtaggtgtctgggtgaacagtttattcctggcatccactaaatataatggagcccgctttttaagctggcatccagaaaaaaaaagaatcccagcaccaaaatattgttttcttcaccaaccatcagttcataggtccattctcttagcgcaactacagagaacaggggcacaaacaggcaaaaaacgggcacaacctcaatggagtgatgcaacctgcctggagtaaatgatgacacaaggcaattgacccacgcatgtatctatctcattttcttacaccttctattaccttctgctctctctgatttggaaaaagctgaaaaaaaaggttgaaaccagttccctgaaattattcccctacttgactaataagtatataaagacggtaggtattgattgtaattctgtaaatctatttcttaaacttcttaaattctacttttatagttagtcttttttttagttttaaaacaccaagaacttagtttcgaataaacacacataaacaaacaaaaagcttatggcacctgttacaattgaaaagttcgtaaatcaagaagaacgacaccttgtttccaaccgatcagcaacaattccgtttggtgaatacatatttaaaagattgttgtccatcgatacgaaatcagttttcggtgttcctggtgacttcaacttatctctattagaatatctctattcacctagtgttgaatcagctggcctaagatgggtcggcacgtgtaatgaactgaacgccgcttatgcggccgacggatattcccgttactctaataagattggctgtttaataaccacgtatggcgttggtgaattaagcgccttgaacggtatagccggttcgttcgctgaaaatgtcaaagttttgcacattgttggtgtggccaagtccatagattcgcgttcaagtaactttagtgatcggaacctacatcatttggtcccacagctacatgattcaaattttaaagggccaaatcataaagtatatcatgatatggtaaaagatagagtcgcttgctcggtagcctacttggaggatattgaaactgcatgtgaccaagtcgataatgttatccgcgatatttacaagtattctaaacctggttatatttttgttcctgcagattttgcggatatgtctgttacatgtgataatttggttaatgttccacgtatatctcaacaagattgtatagtatacccttctgaaaaccaattgtctgacataatcaacaagattactagttggatatattccagtaaaacacctgcgatccttggagacgtactgactgataggtatggtgtgagtaactttttgaacaagcttatctgcaaaactgggatttggaatttttccactgttatgggaaaatctgtaattgatgagtcaaacccaacttatatgggtcaatataatggtaaagaaggtttaaaacaagtctatgaacattttgaactgtgcgacttggtcttgcattttggagtcgacatcaatgaaattaataatgggcattatacttttacttataaaccaaatgctaaaatcattcaatttcatccgaattatattcgccttgtggacactaggcagggcaatgagcaaatgttcaaaggaatcaattttgcccctattttaaaagaactatacaagcgcattgacgtttctaaactttctttgcaatatgattcaaatgtaactcaatatacgaacgaaacaatgcggttagaagatcctaccaatggacaatcaagcattattacacaagttcacttacaaaagacgatgcctaaatttttgaaccctggtgatgttgtcgtttgtgaaacaggctcttttcaattctctgttcgtgatttcgcgtttccttcgcaattaaaatatatatcgcaaggatttttcctttccattggcatggcccttcctgccgccctaggtgttggaattgccatgcaagaccactcaaacgctcacatcaatggtggcaacgtaaaagaggactataagccaagattaattttgtttgaaggtgacggtgcagcacagatgacaatccaagaactgagcaccattctgaagtgcaatattccactagaagttatcatttggaacaataacggctacactattgaaagagccatcatgggccctaccaggtcgtataacgacgttatgtcttggaaatggaccaaactatttgaagcattcggagacttcgacggaaagtatactaatagcactctcattcaatgtccctctaaattagcactgaaattggaggagcttaagaattcaaacaaaagaagcgggatagaacttttagaagtcaaattaggcgaattggatttccccgaacagctaaagtgcatggttgaagcagcggcacttaaaagaaataaaaaagtgacacatggttataatgtgcagcgatacaatcagttacgtaaaaattttggattttatagagcatattcttcactaagaggttgtaagagcgttttcagacgtatataggctaggtcatgtaattagttatgtcacgcttacattcacgccctccccccacatccgctctaaccgaaaaggaaggagttagacaacctgaagtctaggtccctatttatttttttatagttatgttagtattaagaacgttatttatatttcaaatttttcttttttttctgtacagacgcgtgtacgcatgtaacattatactgaaaaccttgcttgagaaggttttgggacgctcgaaggctttaatttgcgggtgtacaatatggacttcctcttttctggcaaccaaacccatacatcgggattcctataataccttcgttggtctccctaacatgtaggtggcggaggggagatatacaatagaacagataccagacaagacataatgggctaaacaagactacaccaattacactgcctcattgatggtggtacataacgaactaatactgtagccctagacttgatagccatcatcatatcgaagtttcactaccctttttccatttgccatctattgaagtaataataggcgcatgcaacttcttttctttttttttcttttctctctcccccgttgttgtctcaccatatccgcaatgacaaaaaaatgatggaagacactaaaggaaaaaattaacgacaaagacagcaccaacagatgtcgttgttccagagctgatgaggggtatctcgaagcacacgaaactttttccttccttcattcacgcacactactctctaatgagcaacggtatacggccttccttccagttacttgaatttgaaataaaaaaaagtttgctgtcttgctatcaagtataaatagacctgcaattattaatcttttgtttcctcgtcattgttctcgttccctttcttccttgtttctttttctgcacaatatttcaagctataccaagcatacaatcaactatctcatatacacatatgttatatccagagaaattccaaggcattggtatctccaacgcaaaggattggaagcatcctaaacttgttagtttcgaccccaaacctttcggtgaccatgacgttgatgttgagattgaagcatgtggaatatgtgggagcgattttcatattgcagtaggcaattggggccctgttccggaaaatcaaattttgggtcacgaaattattggtagggtagtgaaggtgggttcaaaatgtcacacgggtgttaagattggtgatagggttggtgtaggtgcccaagcattggcttgtttcgaatgcgaaagatgcaaaagtgataacgaacaatactgtaccaacgatcatgttctaacaatgtggactccttacaaagatggatacatatctcaaggtggatttgcatcacatgttagattgcatgagcattttgcaattcaaattccggagaatatcccatcacctttggctgcaccattattgtgtgggggaataacagtgtttagtcctttattgagaaacggttgtggacctggtaagcgtgtggggattgttggcataggtggtattggtcacatggggatattactagctaaggccatgggagccgaagtttatgcgttcagtagaggacactccaagcgtgaagacagtatgaagttaggggcggaccattatattgccatgttggaggataaaggctggaccgaacaatattcaaatgctcttgatctgttagttgtgtgtagttcttctcttagtaaagttaattttgactcgattgtgaaaataatgaagattggcggctccattgtttccattgctgctccagaagttaacgagaagctggtactaaaaccactgggtctgatgggggtatctatctcatcttctgctatcggttcaagaaaagaaatagaacagctattaaagctagtcagcgagaaaaatgtgaagatttgggtagagaagctacccataagcgaggagggtgtatctcacgcatttacgagaatggaatccggagatgttaagtacaggtttacacttgtagactatgacaagaaattccataagtgagcggccgcataacaatactgacagtactaaataattgcctacttggcttcacatacgttgcatacgtcgatatagataataatgataatgacagcaggattatcgtaatacgtaatagttgaaaatctcaaaaatgtgtgggtcattacgtaaataatgataggaatgggattcttctatttttcctttttccattctagcagccgtcgggaaaacgtggcatcctctctttcgggctcaattggagtcacgctgccgtgagcatcctctctttccatatctaacaactgagcacgtaaccaatggaaaagcatgagcttagcgttgctccaaaaaagtattggatggttaataccatttgtctgttctcttctgactttgactcctcaaaaaaaaaaaatctacaatcaacagatcgcttcaattacgccctcacaaaaacttttttccttcttcttcgcccacgttaaattttatccctcatgttgtctaacggatttctgcacttgatttattataaaaagacaaagacataatacttctctatcaatttcagttattgttcttccttgcgttattcttctgttcttctttttcttttgtcatatataaccataaccaagtaatacatattcaaactcgagatgtccaaagctacttataaagaaagggctgcaacccatccatccccagtggcagctaaactgtttaacataatgcacgaaaaacaaactaacttatgcgcatcattagatgtaagaactactaaagagctactggagttggttgaggctttaggtccaaaaatttgtttgttgaagacacatgttgacatattaacagatttttctatggagggtaccgttaagcctctgaaagcgttaagcgcgaaatataactttcttttatttgaagaccgtaagtttgctgatattggaaatactgttaagttgcaatatagcgcaggagtttatagaattgccgaatgggctgacattacgaatgcccacggtgttgtaggtcctggcattgtgtctggattgaaacaagcggcagaggaagtgactaaggaaccaagaggtttactaatgctggcggaattatcttgcaaaggctctctagccaccggtgaatatacaaaaggtactgtggatattgcaaagtctgataaggacttcgtaatcggttttattgcacaaagagatatgggaggtcgtgagaattcaaaatgaagtgaagttcctatactttctagagaataggaacttctatagtgagtcgaataagggcgacacaaaatttattctaaatgcataataaatactgataacatcttatagtttgtattatattttgtattatcgttgacatgtataattttgatatcaaaaactgattttccctttattattttcgagatttattttcttaattctctttaacaaactagaaatattgtatatacaaaaaatcataaataatagatgaatagtttaattataggtgttcatcaatcgaaaaagcaacgtatcttatttaaagtgcgttgcttttttctcatttataaggttaaataattctcatatatcaagcaaagtgacaggcgcccttaaatattctgacaaatgctctttccctaaactccccccataaaaaaacccgccgaagcgggtttttacgttatttgcggattaacgattactcgttatcagaaccgcccagggggcccgagcttaagactggccgtcgttttacaacacagaaagagtttgtagaaacgcaaaaaggccatccgtcaggggccttctgcttagtttgatgcctggcagttccctactctcgccttccgcttcctcgctcactgactcgctgcgctcggtcgttcggctgcggcgagcggtatcagctcactcaaaggcggtaatacggttatccacagaatcaggggataacgcaggaaagaacatgtgagcaaaaggccagcaaaaggccaggaaccgtaaaaaggccgcgttgctggcgtttttccataggctccgcccccctgacgagcatcacaaaaatcgacgctcaagtcagaggtggcgaaacccgacaggactataaagataccaggcgtttccccctggaagctccctcgtgcgctctcctgttccgaccctgccgcttaccggatacctgtccgcctttctcccttcgggaagcgtggcgctttctcatagctcacgctgtaggtatctcagttcggtgtaggtcgttcgctccaagctgggctgtgtgcacgaaccccccgttcagcccgaccgctgcgccttatccggtaactatcgtcttgagtccaacccggtaagacacgacttatcgccactggcagcagccactggtaacaggattagcagagcgaggtatgtaggcggtgctacagagttcttgaagtggtgggctaactacggctacactagaagaacagtatttggtatctgcgctctgctgaagccagttaccttcggaaaaagagttggtagctcttgatccggcaaacaaaccaccgctggtagcggtggtttttttgtttgcaagcagcagattacgcgcagaaaaaaaggatctcaagaagatcctttgatcttttctacggggtctgacgctcagtggaacgacgcgcgcgtaactcacgttaagggattttggtcatgagcttgcgccgtcccgtcaagtcagcgtaatgctctgcttt

SEQ ID NO: 33 - DNA, 11163 bp, Artificial Sequence
  Plasmid pGV6101
tagaaaaactcatcgagcatcaaatgaaactgcaatttattcatatcaggattatcaataccatatttttgaaaaagccgtttctgtaatgaaggagaaaactcaccgaggcagttccataggatggcaagatcctggtatcggtctgcgattccgactcgtccaacatcaatacaacctattaatttcccctcgtcaaaaataaggttatcaagtgagaaatcaccatgagtgacgactgaatccggtgagaatggcaaaagtttatgcatttctttccagacttgttcaacaggccagccattacgctcgtcatcaaaatcactcgcatcaaccaaaccgttattcattcgtgattgcgcctgagcgaggcgaaatacgcgatcgctgttaaaaggacaattacaaacaggaatcgagtgcaaccggcgcaggaacactgccagcgcatcaacaatattttcacctgaatcaggatattcttctaatacctggaacgctgtttttccggggatcgcagtggtgagtaaccatgcatcatcaggagtacggataaaatgcttgatggtcggaagtggcataaattccgtcagccagtttagtctgaccatctcatctgtaacatcattggcaacgctacctttgccatgtttcagaaacaactctggcgcatcgggcttcccatacaagcgatagattgtcgcacctgattgcccgacattatcgcgagcccatttatacccatataaatcagcatccatgttggaatttaatcgcggcctcgacgtttcccgttgaatatggctcatattcttcctttttcaatattattgaagcatttatcagggttattgtctcatgagcggatacatatttgaatgtatttagaaaaataaacaaataggggtcagtgttacaaccaattaaccaattctgaacattatcgcgagcccatttatacctgaatatggctcataacaccccttgtttgcctggcggcagtagcgcggtggtcccacctgaccccatgccgaactcagaagtgaaacgccgtagcgccgatggtagtgtggggactccccatgcgagagtagggaactgccaggcatcaaataaaacgaaaggctcagtcgaaagactgggcctttcgcccgggctaattagggggtgtcgcccttattcgactctatagtgaagttcctattctctagaaagtataggaacttctgaagtggggattcagctgaggtatttctttttacaggattgcgcttccagtaaattcggtctgttccattgcgacttgttgaatggcattggcgatgccaatgcccaattccatgggcaacgagtaagtaagtctcttctacatcgtcctattcctttcctaatgtgagctctttttaccttttggtacccatacaacgagtgtcatggggagaggaagaggaagattttagatgtagtgaaagtgaatagatgaaatgggaaatgggcgtgtggtgcggtttctgtggtatagaaaatcggaaatgagagtcaaccaaggtaaaaggtgggataatttcatggtattggaaattattcaaattagctaaccattgctggcccttgtgcgtgtcctgtattttgcatattctgtatttgctatgtagaaccatgggatagattatgcaatatttgtgaaaagattcaaccttttaaggtgtatacgtagtattggcccatgaatatcttaaggttggaatagtagtaccacttgtgtcaattatccattaaggggggagagtgaggtgagaggcagggctggctgggtggtgaatatgacctttctattttttttagttaactcagataaagtataaatacatgggcatgattatctgtaatggctagagtttcccatcatgtcttaatcataatcttaattatatacttttgattacctcaaaaaccatccactaaagccaaacatattatagtattaactattaatattaaggataaaactacaactcaaaaccaacttaaattacagtcgagatgctttcactacgtcaatctataagatttttcaagccagccacaagaactttgtgtagctctagatatctgcttatgttgactaaagctacaaaagagcagaaatcattggtgaaaaataggggtgcagaacttgttgtggactgtttggtagaacagggcgtaacacatgtttttggtatcccaggtgcaaaaatcgacgccgtgtttgatgcattacaagacaagggtccagaaattattgttgctagacatgagcaaaatgccgcatttatggcgcaagctgtaggtaggcttacaggtaaacctggtgttgtcctagttacgtctggcccaggagcctccaatttagcaactggtctattgacagctaatactgagggagatcctgtagttgcgttagccggtaatgtaattagagctgataggcttaagagaactcaccagtctctagacaacgctgctttattccaaccgatcaccaagtactcagtagaggtacaagacgtaaagaatatacctgaagctgtgacaaacgcatttcgtatagcttctgctggtcaggctggtgccgcgtttgtttcttttcctcaagacgttgtcaatgaagtgaccaatactaaaaacgttagagcggttgcagcccctaaactaggtccagccgcagacgacgcaattagcgctgcaattgctaaaattcagacggcgaaactaccagtagtccttgtcggtatgaagggcggaagaccagaagcaataaaagctgttcgtaagttattgaagaaagtccaattacctttcgttgagacttaccaagcagcaggtactttatctagagatttagaggatcagtattttggaaggataggtctatttagaaaccaaccaggagatttactattagaacaagctgatgttgtacttactatcggttatgatcctatagagtatgacccaaagttttggaacataaatggggatagaacaattatacatctagacgagataatcgccgacatcgatcacgcttatcaaccagatttagaactaatcggagatatcccgtcaacaatcaatcatattgaacatgatgctgtaaaggttgagttcgctgaacgtgagcagaaaatcttatctgatctaaagcaatatatgcatgagggtgaacaagttccagcagactggaaatctgaccgtgcacatcctttggaaatcgttaaggaactaagaaatgcggtcgatgatcatgtgactgttacatgtgatatcggttcacatgcaatttggatgtcacgttattttaggagctacgaaccattaactttaatgatatctaacgggatgcaaactctgggggttgcacttccttgggctattggcgctagtttagttaagcccggtgagaaggtggtatcggtatcaggtgatggtggctttctgttttcggctatggaattagaaactgcagtccgtttaaaagctcccattgtgcatattgtctggaatgattctacttacgacatggttgcttttcaacagttgaagaaatacaatagaacttcggctgtagactttggtaacatcgatattgtgaaatatgctgagtcttttggcgcaacaggcctgagggtggaaagtccagatcagttagctgatgtgttgagacaagggatgaatgccgagggaccggtaatcatagatgtgccagttgactactcagacaatattaatttggcttctgataaacttcctaaagagtttggcgagctaatgaagaccaaagccttataaggatccataaaaaacacgctttttcagttcgagtttatcattatcaatactgccatttcaaagaatacgtaaataattaatagtagtgattttcctaactttatttagtcaaaaaattagccttttaattctgctgtaacccgtacatgcccaaaatagggggcgggttacacagaatatataacatcgtaggtgtctgggtgaacagtttattcctggcatccactaaatataatggagcccgctttttaagctggcatccagaaaaaaaaagaatcccagcaccaaaatattgttttcttcaccaaccatcagttcataggtccattctcttagcgcaactacagagaacaggggcacaaacaggcaaaaaacgggcacaacctcaatggagtgatgcaacctgcctggagtaaatgatgacacaaggcaattgacccacgcatgtatctatctcattttcttacaccttctattaccttctgctctctctgatttggaaaaagctgaaaaaaaaggttgaaaccagttccctgaaattattcccctacttgactaataagtatataaagacggtaggtattgattgtaattctgtaaatctatttcttaaacttcttaaattctacttttatagttagtcttttttttagttttaaaacaccaagaacttagtttcgaataaacacacataaacaaacaaaaagcttatgtatactgttggagattatttgttagatagattgcatgaactaggcattgaagaaattttcggagttcccggggattacaatctgcaatttctagaccagattatttcacataaagacatgaaatgggtcggaaatgcaaatgagttaaatgcatcttacatggccgatggttatgccagaaccaaaaaggcggctgctttcttgactaccttcggggtgggtgaattatcggcagttaatggcttggctggatcatacgcagaaaacttgcctgtcgttgaaatcgttggctcgccaacatcaaaagttcaaaatgaaggaaaattcgtccaccacactttggcagatggtgacttcaagcacttcatgaaaatgcatgaacctgtaacggctgccagaactctactaactgctgagaatgcaactgtagagattgatcgtgtcttgagcgctcttttaaaggaaagaaagccagtctatattaacctgccagtagacgtcgcagcggccaaagcagagaagcctagcttaccacttaaaaaggaaaatagtacctcaaacacttcagatcaagagattcttaacaagatccaggaatctttgaaaaacgctaaaaagcccattgttataactggccatgagatcatatcatttggtttggagaaaacagtgacccagttcattagtaagacgaaactgccaataaccactctaaatttcggtaagtcctccgttgatgaagcgttgcctagcttcttgggtatttacaacggcaccttgtcagaacccaatctgaaagaatttgttgaatctgcagactttatattgatgttgggagtaaagttgactgacagctctactggtgcttttacacaccatctgaatgaaaacaagatgatatctcttaatatcgatgaaggtaagatattcaatgaaagaatacagaacttcgacttcgagagtctaatttcttccttactggacttaagtgaaatcgagtataaaggtaagtacattgacaaaaagcaggaagattttgttccgagcaacgcgctacttagtcaagatagattatggcaagctgttgaaaatctgacacaatccaatgagacaattgttgccgaacaaggtacctccttttttggcgcttcttccatcttcctaaagtccaagtctcatttcatagggcagccattgtggggtagcatcggttacacctttcctgctgctctagggtcccaaattgctgataaagaaagtagacatttgttgtttataggagacggatctttacaattgacagttcaagagttaggtttagccatcagagagaagattaatcctatctgcttcataataaacaacgatggctatacagttgagagggaaattcatggacctaatcaatcttataatgatataccaatgtggaattatagcaagttacctgaatcttttggggctaccgaggatcgtgttgtttctaagattgtaagaaccgaaaatgaatttgtttctgttatgaaggaagcacaagcggaccctaacaggatgtactggattgagttaattcttgctaaggagggtgcgccaaaggttctaaagaagatgggtaagttgttcgccgaacaaaacaaatccgtgacacatggttataatgtgcagcgatacaatcagttacgtaaaaattttggattttatagagcatattcttcactaagaggttgtaagagcgttttcagacgtatataggctaggtcatgtaattagttatgtcacgcttacattcacgccctccccccacatccgctctaaccgaaaaggaaggagttagacaacctgaagtctaggtccctatttatttttttatagttatgttagtattaagaacgttatttatatttcaaatttttcttttttttctgtacagacgcgtgtacgcatgtaacattatactgaaaaccttgcttgagaaggttttgggacgctcgaaggctttaatttgcgggtgtacaatatggacttcctcttttctggcaaccaaacccatacatcgggattcctataataccttcgttggtctccctaacatgtaggtggcggaggggagatatacaatagaacagataccagacaagacataatgggctaaacaagactacaccaattacactgcctcattgatggtggtacataacgaactaatactgtagccctagacttgatagccatcatcatatcgaagtttcactaccctttttccatttgccatctattgaagtaataataggcgcatgcaacttcttttctttttttttcttttctctctcccccgttgttgtctcaccatatccgcaatgacaaaaaaatgatggaagacactaaaggaaaaaattaacgacaaagacagcaccaacagatgtcgttgttccagagctgatgaggggtatctcgaagcacacgaaactttttccttccttcattcacgcacactactctctaatgagcaacggtatacggccttccttccagttacttgaatttgaaataaaaaaaagtttgctgtcttgctatcaagtataaatagacctgcaattattaatcttttgtttcctcgtcattgttctcgttccctttcttccttgtttctttttctgcacaatatttcaagctataccaagcatacaatcaactatctcatatacacatatgttgagaacgtcaacattgttcaccaggcgtgtccaaccaagcctattttctagaaacattcttagattgcaatccacagctgcattatatccagagaaattccaaggcattggtatctccaacgcaaaggattggaagcatcctaaacttgttagtttcgaccccaaacctttcggtgaccatgacgttgatgttgagattgaagcatgtggaatatgtgggagcgattttcatattgcagtaggcaattggggccctgttccggaaaatcaaattttgggtcacgaaattattggtagggtagtgaaggtgggttcaaaatgtcacacgggtgttaagattggtgatagggttggtgtaggtgcccaagcattggcttgtttcgaatgcgaaagatgcaaaagtgataacgaacaatactgtaccaacgatcatgttctaacaatgtggactccttacaaagatggatacatatctcaaggtggatttgcatcacatgttagattgcatgagcattttgcaattcaaattccggagaatatcccatcacctttggctgcaccattattgtgtgggggaataacagtgtttagtcctttattgagaaacggttgtggacctggtaagcgtgtggggattgttggcataggtggtattggtcacatggggatattactagctaaggccatgggagccgaagtttatgcgttcagtagaggacactccaagcgtgaagacagtatgaagttaggggcggaccattatattgccatgttggaggataaaggctggaccgaacaatattcaaatgctcttgatctgttagttgtgtgtagttcttctcttagtaaagttaattttgactcgattgtgaaaataatgaagattggcggctccattgtttccattgctgctccagaagttaacgagaagctggtactaaaaccactgggtctgatgggggtatctatctcatcttctgctatcggttcaagaaaagaaatagaacagctattaaagctagtcagcgagaaaaatgtgaagatttgggtagagaagctacccataagcgaggagggtgtatctcacgcatttacgagaatggaatccggagatgttaagtacaggtttacacttgtagactatgacaagaaattccataagtgagcggccgcataacaatactgacagtactaaataattgcctacttggcttcacatacgttgcatacgtcgatatagataataatgataatgacagcaggattatcgtaatacgtaatagttgaaaatctcaaaaatgtgtgggtcattacgtaaataatgataggaatgggattcttctatttttcctttttccattctagcagccgtcgggaaaacgtggcatcctctctttcgggctcaattggagtcacgctgccgtgagcatcctctctttccatatctaacaactgagcacgtaaccaatggaaaagcatgagcttagcgttgctccaaaaaagtattggatggttaataccatttgtctgttctcttctgactttgactcctcaaaaaaaaaaaatctacaatcaacagatcgcttcaattacgccctcacaaaaacttttttccttcttcttcgcccacgttaaattttatccctcatgttgtctaacggatttctgcacttgatttattataaaaagacaaagacataatacttctctatcaatttcagttattgttcttccttgcgttattcttctgttcttctttttcttttgtcatatataaccataaccaagtaatacatattcaaactcgagatgtccaaagctacttataaagaaagggctgcaacccatccatccccagtggcagctaaactgtttaacataatgcacgaaaaacaaactaacttatgcgcatcattagatgtaagaactactaaagagctactggagttggttgaggctttaggtccaaaaatttgtttgttgaagacacatgttgacatattaacagatttttctatggagggtaccgttaagcctctgaaagcgttaagcgcgaaatataactttcttttatttgaagaccgtaagtttgctgatattggaaatactgttaagttgcaatatagcgcaggagtttatagaattgccgaatgggctgacattacgaatgcccacggtgttgtaggtcctggcattgtgtctggattgaaacaagcggcagaggaagtgactaaggaaccaagaggtttactaatgctggcggaattatcttgcaaaggctctctagccaccggtgaatatacaaaaggtactgtggatattgcaaagtctgataaggacttcgtaatcggttttattgcacaaagagatatgggaggtcgtgagaattcaaaatgaagtgaagttcctatactttctagagaataggaacttctatagtgagtcgaataagggcgacacaaaatttattctaaatgcataataaatactgataacatcttatagtttgtattatattttgtattatcgttgacatgtataattttgatatcaaaaactgattttccctttattattttcgagatttattttcttaattctctttaacaaactagaaatattgtatatacaaaaaatcataaataatagatgaatagtttaattataggtgttcatcaatcgaaaaagcaacgtatcttatttaaagtgcgttgcttttttctcatttataaggttaaataattctcatatatcaagcaaagtgacaggcgcccttaaatattctgacaaatgctctttccctaaactccccccataaaaaaacccgccgaagcgggtttttacgttatttgcggattaacgattactcgttatcagaaccgcccagggggcccgagcttaagactggccgtcgttttacaacacagaaagagtttgtagaaacgcaaaaaggccatccgtcaggggccttctgcttagtttgatgcctggcagttccctactctcgccttccgcttcctcgctcactgactcgctgcgctcggtcgttcggctgcggcgagcggtatcagctcactcaaaggcggtaatacggttatccacagaatcaggggataacgcaggaaagaacatgtgagcaaaaggccagcaaaaggccaggaaccgtaaaaaggccgcgttgctggcgtttttccataggctccgcccccctgacgagcatcacaaaaatcgacgctcaagtcagaggtggcgaaacccgacaggactataaagataccaggcgtttccccctggaagctccctcgtgcgctctcctgttccgaccctgccgcttaccggatacctgtccgcctttctcccttcgggaagcgtggcgctttctcatagctcacgctgtaggtatctcagttcggtgtaggtcgttcgctccaagctgggctgtgtgcacgaaccccccgttcagcccgaccgctgcgccttatccggtaactatcgtcttgagtccaacccggtaagacacgacttatcgccactggcagcagccactggtaacaggattagcagagcgaggtatgtaggcggtgctacagagttcttgaagtggtgggctaactacggctacactagaagaacagtatttggtatctgcgctctgctgaagccagttaccttcggaaaaagagttggtagctcttgatccggcaaacaaaccaccgctggtagcggtggtttttttgtttgcaagcagcagattacgcgcagaaaaaaaggatctcaagaagatcctttgatcttttctacggggtctgacgctcagtggaacgacgcgcgcgtaactcacgttaagggattttggtcatgagcttgcgccgtcccgtcaagtcagcgtaatgctctgcttt

SEQ ID NO: 34 - DNA, 11181 bp, Artificial Sequence
  Plasmid pGV6102
tagaaaaactcatcgagcatcaaatgaaactgcaatttattcatatcaggattatcaataccatatttttgaaaaagccgtttctgtaatgaaggagaaaactcaccgaggcagttccataggatggcaagatcctggtatcggtctgcgattccgactcgtccaacatcaatacaacctattaatttcccctcgtcaaaaataaggttatcaagtgagaaatcaccatgagtgacgactgaatccggtgagaatggcaaaagtttatgcatttctttccagacttgttcaacaggccagccattacgctcgtcatcaaaatcactcgcatcaaccaaaccgttattcattcgtgattgcgcctgagcgaggcgaaatacgcgatcgctgttaaaaggacaattacaaacaggaatcgagtgcaaccggcgcaggaacactgccagcgcatcaacaatattttcacctgaatcaggatattcttctaatacctggaacgctgtttttccggggatcgcagtggtgagtaaccatgcatcatcaggagtacggataaaatgcttgatggtcggaagtggcataaattccgtcagccagtttagtctgaccatctcatctgtaacatcattggcaacgctacctttgccatgtttcagaaacaactctggcgcatcgggcttcccatacaagcgatagattgtcgcacctgattgcccgacattatcgcgagcccatttatacccatataaatcagcatccatgttggaatttaatcgcggcctcgacgtttcccgttgaatatggctcatattcttcctttttcaatattattgaagcatttatcagggttattgtctcatgagcggatacatatttgaatgtatttagaaaaataaacaaataggggtcagtgttacaaccaattaaccaattctgaacattatcgcgagcccatttatacctgaatatggctcataacaccccttgtttgcctggcggcagtagcgcggtggtcccacctgaccccatgccgaactcagaagtgaaacgccgtagcgccgatggtagtgtggggactccccatgcgagagtagggaactgccaggcatcaaataaaacgaaaggctcagtcgaaagactgggcctttcgcccgggctaattagggggtgtcgcccttattcgactctatagtgaagttcctattctctagaaagtataggaacttctgaagtggggattcagctgaggtatttctttttacaggattgcgcttccagtaaattcggtctgttccattgcgacttgttgaatggcattggcgatgccaatgcccaattccatgggcaacgagtaagtaagtctcttctacatcgtcctattcctttcctaatgtgagctctttttaccttttggtacccatacaacgagtgtcatggggagaggaagaggaagattttagatgtagtgaaagtgaatagatgaaatgggaaatgggcgtgtggtgcggtttctgtggtatagaaaatcggaaatgagagtcaaccaaggtaaaaggtgggataatttcatggtattggaaattattcaaattagctaaccattgctggcccttgtgcgtgtcctgtattttgcatattctgtatttgctatgtagaaccatgggatagattatgcaatatttgtgaaaagattcaaccttttaaggtgtatacgtagtattggcccatgaatatcttaaggttggaatagtagtaccacttgtgtcaattatccattaaggggggagagtgaggtgagaggcagggctggctgggtggtgaatatgacctttctattttttttagttaactcagataaagtataaatacatgggcatgattatctgtaatggctagagtttcccatcatgtcttaatcataatcttaattatatacttttgattacctcaaaaaccatccactaaagccaaacatattatagtattaactattaatattaaggataaaactacaactcaaaaccaacttaaattacagtcgagatgctttcactacgtcaatctataagatttttcaagccagccacaagaactttgtgtagctctagatatctgcttcagcaaaaacccgtggtgatgttgactaaagctacaaaagagcagaaatcattggtgaaaaataggggtgcagaacttgttgtggactgtttggtagaacagggcgtaacacatgtttttggtatcccaggtgcaaaaatcgacgccgtgtttgatgcattacaagacaagggtccagaaattattgttgctagacatgagcaaaatgccgcatttatggcgcaagctgtaggtaggcttacaggtaaacctggtgttgtcctagttacgtctggcccaggagcctccaatttagcaactggtctattgacagctaatactgagggagatcctgtagttgcgttagccggtaatgtaattagagctgataggcttaagagaactcaccagtctctagacaacgctgctttattccaaccgatcaccaagtactcagtagaggtacaagacgtaaagaatatacctgaagctgtgacaaacgcatttcgtatagcttctgctggtcaggctggtgccgcgtttgtttcttttcctcaagacgttgtcaatgaagtgaccaatactaaaaacgttagagcggttgcagcccctaaactaggtccagccgcagacgacgcaattagcgctgcaattgctaaaattcagacggcgaaactaccagtagtccttgtcggtatgaagggcggaagaccagaagcaataaaagctgttcgtaagttattgaagaaagtccaattacctttcgttgagacttaccaagcagcaggtactttatctagagatttagaggatcagtattttggaaggataggtctatttagaaaccaaccaggagatttactattagaacaagctgatgttgtacttactatcggttatgatcctatagagtatgacccaaagttttggaacataaatggggatagaacaattatacatctagacgagataatcgccgacatcgatcacgcttatcaaccagatttagaactaatcggagatatcccgtcaacaatcaatcatattgaacatgatgctgtaaaggttgagttcgctgaacgtgagcagaaaatcttatctgatctaaagcaatatatgcatgagggtgaacaagttccagcagactggaaatctgaccgtgcacatcctttggaaatcgttaaggaactaagaaatgcggtcgatgatcatgtgactgttacatgtgatatcggttcacatgcaatttggatgtcacgttattttaggagctacgaaccattaactttaatgatatctaacgggatgcaaactctgggggttgcacttccttgggctattggcgctagtttagttaagcccggtgagaaggtggtatcggtatcaggtgatggtggctttctgttttcggctatggaattagaaactgcagtccgtttaaaagctcccattgtgcatattgtctggaatgattctacttacgacatggttgcttttcaacagttgaagaaatacaatagaacttcggctgtagactttggtaacatcgatattgtgaaatatgctgagtcttttggcgcaacaggcctgagggtggaaagtccagatcagttagctgatgtgttgagacaagggatgaatgccgagggaccggtaatcatagatgtgccagttgactactcagacaatattaatttggcttctgataaacttcctaaagagtttggcgagctaatgaagaccaaagccttataaggatccataaaaaacacgctttttcagttcgagtttatcattatcaatactgccatttcaaagaatacgtaaataattaatagtagtgattttcctaactttatttagtcaaaaaattagccttttaattctgctgtaacccgtacatgcccaaaatagggggcgggttacacagaatatataacatcgtaggtgtctgggtgaacagtttattcctggcatccactaaatataatggagcccgctttttaagctggcatccagaaaaaaaaagaatcccagcaccaaaatattgttttcttcaccaaccatcagttcataggtccattctcttagcgcaactacagagaacaggggcacaaacaggcaaaaaacgggcacaacctcaatggagtgatgcaacctgcctggagtaaatgatgacacaaggcaattgacccacgcatgtatctatctcattttcttacaccttctattaccttctgctctctctgatttggaaaaagctgaaaaaaaaggttgaaaccagttccctgaaattattcccctacttgactaataagtatataaagacggtaggtattgattgtaattctgtaaatctatttcttaaacttcttaaattctacttttatagttagtcttttttttagttttaaaacaccaagaacttagtttcgaataaacacacataaacaaacaaaaagcttatgtatactgttggagattatttgttagatagattgcatgaactaggcattgaagaaattttcggagttcccggggattacaatctgcaatttctagaccagattatttcacataaagacatgaaatgggtcggaaatgcaaatgagttaaatgcatcttacatggccgatggttatgccagaaccaaaaaggcggctgctttcttgactaccttcggggtgggtgaattatcggcagttaatggcttggctggatcatacgcagaaaacttgcctgtcgttgaaatcgttggctcgccaacatcaaaagttcaaaatgaaggaaaattcgtccaccacactttggcagatggtgacttcaagcacttcatgaaaatgcatgaacctgtaacggctgccagaactctactaactgctgagaatgcaactgtagagattgatcgtgtcttgagcgctcttttaaaggaaagaaagccagtctatattaacctgccagtagacgtcgcagcggccaaagcagagaagcctagcttaccacttaaaaaggaaaatagtacctcaaacacttcagatcaagagattcttaacaagatccaggaatctttgaaaaacgctaaaaagcccattgttataactggccatgagatcatatcatttggtttggagaaaacagtgacccagttcattagtaagacgaaactgccaataaccactctaaatttcggtaagtcctccgttgatgaagcgttgcctagcttcttgggtatttacaacggcaccttgtcagaacccaatctgaaagaatttgttgaatctgcagactttatattgatgttgggagtaaagttgactgacagctctactggtgcttttacacaccatctgaatgaaaacaagatgatatctcttaatatcgatgaaggtaagatattcaatgaaagaatacagaacttcgacttcgagagtctaatttcttccttactggacttaagtgaaatcgagtataaaggtaagtacattgacaaaaagcaggaagattttgttccgagcaacgcgctacttagtcaagatagattatggcaagctgttgaaaatctgacacaatccaatgagacaattgttgccgaacaaggtacctccttttttggcgcttcttccatcttcctaaagtccaagtctcatttcatagggcagccattgtggggtagcatcggttacacctttcctgctgctctagggtcccaaattgctgataaagaaagtagacatttgttgtttataggagacggatctttacaattgacagttcaagagttaggtttagccatcagagagaagattaatcctatctgcttcataataaacaacgatggctatacagttgagagggaaattcatggacctaatcaatcttataatgatataccaatgtggaattatagcaagttacctgaatcttttggggctaccgaggatcgtgttgtttctaagattgtaagaaccgaaaatgaatttgtttctgttatgaaggaagcacaagcggaccctaacaggatgtactggattgagttaattcttgctaaggagggtgcgccaaaggttctaaagaagatgggtaagttgttcgccgaacaaaacaaatccgtgacacatggttataatgtgcagcgatacaatcagttacgtaaaaattttggattttatagagcatattcttcactaagaggttgtaagagcgttttcagacgtatataggctaggtcatgtaattagttatgtcacgcttacattcacgccctccccccacatccgctctaaccgaaaaggaaggagttagacaacctgaagtctaggtccctatttatttttttatagttatgttagtattaagaacgttatttatatttcaaatttttcttttttttctgtacagacgcgtgtacgcatgtaacattatactgaaaaccttgcttgagaaggttttgggacgctcgaaggctttaatttgcgggtgtacaatatggacttcctcttttctggcaaccaaacccatacatcgggattcctataataccttcgttggtctccctaacatgtaggtggcggaggggagatatacaatagaacagataccagacaagacataatgggctaaacaagactacaccaattacactgcctcattgatggtggtacataacgaactaatactgtagccctagacttgatagccatcatcatatcgaagtttcactaccctttttccatttgccatctattgaagtaataataggcgcatgcaacttcttttctttttttttcttttctctctcccccgttgttgtctcaccatatccgcaatgacaaaaaaatgatggaagacactaaaggaaaaaattaacgacaaagacagcaccaacagatgtcgttgttccagagctgatgaggggtatctcgaagcacacgaaactttttccttccttcattcacgcacactactctctaatgagcaacggtatacggccttccttccagttacttgaatttgaaataaaaaaaagtttgctgtcttgctatcaagtataaatagacctgcaattattaatcttttgtttcctcgtcattgttctcgttccctttcttccttgtttctttttctgcacaatatttcaagctataccaagcatacaatcaactatctcatatacacatatgttgagaacgtcaacattgttcaccaggcgtgtccaaccaagcctattttctagaaacattcttagattgcaatccacagctgcattatatccagagaaattccaaggcattggtatctccaacgcaaaggattggaagcatcctaaacttgttagtttcgaccccaaacctttcggtgaccatgacgttgatgttgagattgaagcatgtggaatatgtgggagcgattttcatattgcagtaggcaattggggccctgttccggaaaatcaaattttgggtcacgaaattattggtagggtagtgaaggtgggttcaaaatgtcacacgggtgttaagattggtgatagggttggtgtaggtgcccaagcattggcttgtttcgaatgcgaaagatgcaaaagtgataacgaacaatactgtaccaacgatcatgttctaacaatgtggactccttacaaagatggatacatatctcaaggtggatttgcatcacatgttagattgcatgagcattttgcaattcaaattccggagaatatcccatcacctttggctgcaccattattgtgtgggggaataacagtgtttagtcctttattgagaaacggttgtggacctggtaagcgtgtggggattgttggcataggtggtattggtcacatggggatattactagctaaggccatgggagccgaagtttatgcgttcagtagaggacactccaagcgtgaagacagtatgaagttaggggcggaccattatattgccatgttggaggataaaggctggaccgaacaatattcaaatgctcttgatctgttagttgtgtgtagttcttctcttagtaaagttaattttgactcgattgtgaaaataatgaagattggcggctccattgtttccattgctgctccagaagttaacgagaagctggtactaaaaccactgggtctgatgggggtatctatctcatcttctgctatcggttcaagaaaagaaatagaacagctattaaagctagtcagcgagaaaaatgtgaagatttgggtagagaagctacccataagcgaggagggtgtatctcacgcatttacgagaatggaatccggagatgttaagtacaggtttacacttgtagactatgacaagaaattccataagtgagcggccgcataacaatactgacagtactaaataattgcctacttggcttcacatacgttgcatacgtcgatatagataataatgataatgacagcaggattatcgtaatacgtaatagttgaaaatctcaaaaatgtgtgggtcattacgtaaataatgataggaatgggattcttctatttttcctttttccattctagcagccgtcgggaaaacgtggcatcctctctttcgggctcaattggagtcacgctgccgtgagcatcctctctttccatatctaacaactgagcacgtaaccaatggaaaagcatgagcttagcgttgctccaaaaaagtattggatggttaataccatttgtctgttctcttctgactttgactcctcaaaaaaaaaaaatctacaatcaacagatcgcttcaattacgccctcacaaaaacttttttccttcttcttcgcccacgttaaattttatccctcatgttgtctaacggatttctgcacttgatttattataaaaagacaaagacataatacttctctatcaatttcagttattgttcttccttgcgttattcttctgttcttctttttcttttgtcatatataaccataaccaagtaatacatattcaaactcgagatgtccaaagctacttataaagaaagggctgcaacccatccatccccagtggcagctaaactgtttaacataatgcacgaaaaacaaactaacttatgcgcatcattagatgtaagaactactaaagagctactggagttggttgaggctttaggtccaaaaatttgtttgttgaagacacatgttgacatattaacagatttttctatggagggtaccgttaagcctctgaaagcgttaagcgcgaaatataactttcttttatttgaagaccgtaagtttgctgatattggaaatactgttaagttgcaatatagcgcaggagtttatagaattgccgaatgggctgacattacgaatgcccacggtgttgtaggtcctggcattgtgtctggattgaaacaagcggcagaggaagtgactaaggaaccaagaggtttactaatgctggcggaattatcttgcaaaggctctctagccaccggtgaatatacaaaaggtactgtggatattgcaaagtctgataaggacttcgtaatcggttttattgcacaaagagatatgggaggtcgtgagaattcaaaatgaagtgaagttcctatactttctagagaataggaacttctatagtgagtcgaataagggcgacacaaaatttattctaaatgcataataaatactgataacatcttatagtttgtattatattttgtattatcgttgacatgtataattttgatatcaaaaactgattttccctttattattttcgagatttattttcttaattctctttaacaaactagaaatattgtatatacaaaaaatcataaataatagatgaatagtttaattataggtgttcatcaatcgaaaaagcaacgtatcttatttaaagtgcgttgcttttttctcatttataaggttaaataattctcatatatcaagcaaagtgacaggcgcccttaaatattctgacaaatgctctttccctaaactccccccataaaaaaacccgccgaagcgggtttttacgttatttgcggattaacgattactcgttatcagaaccgcccagggggcccgagcttaagactggccgtcgttttacaacacagaaagagtttgtagaaacgcaaaaaggccatccgtcaggggccttctgcttagtttgatgcctggcagttccctactctcgccttccgcttcctcgctcactgactcgctgcgctcggtcgttcggctgcggcgagcggtatcagctcactcaaaggcggtaatacggttatccacagaatcaggggataacgcaggaaagaacatgtgagcaaaaggccagcaaaaggccaggaaccgtaaaaaggccgcgttgctggcgtttttccataggctccgcccccctgacgagcatcacaaaaatcgacgctcaagtcagaggtggcgaaacccgacaggactataaagataccaggcgtttccccctggaagctccctcgtgcgctctcctgttccgaccctgccgcttaccggatacctgtccgcctttctcccttcgggaagcgtggcgctttctcatagctcacgctgtaggtatctcagttcggtgtaggtcgttcgctccaagctgggctgtgtgcacgaaccccccgttcagcccgaccgctgcgccttatccggtaactatcgtcttgagtccaacccggtaagacacgacttatcgccactggcagcagccactggtaacaggattagcagagcgaggtatgtaggcggtgctacagagttcttgaagtggtgggctaactacggctacactagaagaacagtatttggtatctgcgctctgctgaagccagttaccttcggaaaaagagttggtagctcttgatccggcaaacaaaccaccgctggtagcggtggtttttttgtttgcaagcagcagattacgcgcagaaaaaaaggatctcaagaagatcctttgatcttttctacggggtctgacgctcagtggaacgacgcgcgcgtaactcacgttaagggattttggtcatgagcttgcgccgtcccgtcaagtcagcgtaatgctctgcttt

SEQ ID NO: 35 - DNA, 11424 bp, Artificial Sequence
  Plasmid pGV6103
tagaaaaactcatcgagcatcaaatgaaactgcaatttattcatatcaggattatcaataccatatttttgaaaaagccgtttctgtaatgaaggagaaaactcaccgaggcagttccataggatggcaagatcctggtatcggtctgcgattccgactcgtccaacatcaatacaacctattaatttcccctcgtcaaaaataaggttatcaagtgagaaatcaccatgagtgacgactgaatccggtgagaatggcaaaagtttatgcatttctttccagacttgttcaacaggccagccattacgctcgtcatcaaaatcactcgcatcaaccaaaccgttattcattcgtgattgcgcctgagcgaggcgaaatacgcgatcgctgttaaaaggacaattacaaacaggaatcgagtgcaaccggcgcaggaacactgccagcgcatcaacaatattttcacctgaatcaggatattcttctaatacctggaacgctgtttttccggggatcgcagtggtgagtaaccatgcatcatcaggagtacggataaaatgcttgatggtcggaagtggcataaattccgtcagccagtttagtctgaccatctcatctgtaacatcattggcaacgctacctttgccatgtttcagaaacaactctggcgcatcgggcttcccatacaagcgatagattgtcgcacctgattgcccgacattatcgcgagcccatttatacccatataaatcagcatccatgttggaatttaatcgcggcctcgacgtttcccgttgaatatggctcatattcttcctttttcaatattattgaagcatttatcagggttattgtctcatgagcggatacatatttgaatgtatttagaaaaataaacaaataggggtcagtgttacaaccaattaaccaattctgaacattatcgcgagcccatttatacctgaatatggctcataacaccccttgtttgcctggcggcagtagcgcggtggtcccacctgaccccatgccgaactcagaagtgaaacgccgtagcgccgatggtagtgtggggactccccatgcgagagtagggaactgccaggcatcaaataaaacgaaaggctcagtcgaaagactgggcctttcgcccgggctaattagggggtgtcgcccttattcgactctatagtgaagttcctattctctagaaagtataggaacttctgaagtggggattcagctgaggtatttctttttacaggattgcgcttccagtaaattcggtctgttccattgcgacttgttgaatggcattggcgatgccaatgcccaattccatgggcaacgagtaagtaagtctcttctacatcgtcctattcctttcctaatgtgagctctttttaccttttggtacccatacaacgagtgtcatggggagaggaagaggaagattttagatgtagtgaaagtgaatagatgaaatgggaaatgggcgtgtggtgcggtttctgtggtatagaaaatcggaaatgagagtcaaccaaggtaaaaggtgggataatttcatggtattggaaattattcaaattagctaaccattgctggcccttgtgcgtgtcctgtattttgcatattctgtatttgctatgtagaaccatgggatagattatgcaatatttgtgaaaagattcaaccttttaaggtgtatacgtagtattggcccatgaatatcttaaggttggaatagtagtaccacttgtgtcaattatccattaaggggggagagtgaggtgagaggcagggctggctgggtggtgaatatgacctttctattttttttagttaactcagataaagtataaatacatgggcatgattatctgtaatggctagagtttcccatcatgtcttaatcataatcttaattatatacttttgattacctcaaaaaccatccactaaagccaaacatattatagtattaactattaatattaaggataaaactacaactcaaaaccaacttaaattacagtcgagatgctttcactacgtcaatctataagatttttcaagccagccacaagaactttgtgtagctctagatatctgcttatgttgactaaagctacaaaagagcagaaatcattggtgaaaaataggggtgcagaacttgttgtggactgtttggtagaacagggcgtaacacatgtttttggtatcccaggtgcaaaaatcgacgccgtgtttgatgcattacaagacaagggtccagaaattattgttgctagacatgagcaaaatgccgcatttatggcgcaagctgtaggtaggcttacaggtaaacctggtgttgtcctagttacgtctggcccaggagcctccaatttagcaactggtctattgacagctaatactgagggagatcctgtagttgcgttagccggtaatgtaattagagctgataggcttaagagaactcaccagtctctagacaacgctgctttattccaaccgatcaccaagtactcagtagaggtacaagacgtaaagaatatacctgaagctgtgacaaacgcatttcgtatagcttctgctggtcaggctggtgccgcgtttgtttcttttcctcaagacgttgtcaatgaagtgaccaatactaaaaacgttagagcggttgcagcccctaaactaggtccagccgcagacgacgcaattagcgctgcaattgctaaaattcagacggcgaaactaccagtagtccttgtcggtatgaagggcggaagaccagaagcaataaaagctgttcgtaagttattgaagaaagtccaattacctttcgttgagacttaccaagcagcaggtactttatctagagatttagaggatcagtattttggaaggataggtctatttagaaaccaaccaggagatttactattagaacaagctgatgttgtacttactatcggttatgatcctatagagtatgacccaaagttttggaacataaatggggatagaacaattatacatctagacgagataatcgccgacatcgatcacgcttatcaaccagatttagaactaatcggagatatcccgtcaacaatcaatcatattgaacatgatgctgtaaaggttgagttcgctgaacgtgagcagaaaatcttatctgatctaaagcaatatatgcatgagggtgaacaagttccagcagactggaaatctgaccgtgcacatcctttggaaatcgttaaggaactaagaaatgcggtcgatgatcatgtgactgttacatgtgatatcggttcacatgcaatttggatgtcacgttattttaggagctacgaaccattaactttaatgatatctaacgggatgcaaactctgggggttgcacttccttgggctattggcgctagtttagttaagcccggtgagaaggtggtatcggtatcaggtgatggtggctttctgttttcggctatggaattagaaactgcagtccgtttaaaagctcccattgtgcatattgtctggaatgattctacttacgacatggttgcttttcaacagttgaagaaatacaatagaacttcggctgtagactttggtaacatcgatattgtgaaatatgctgagtcttttggcgcaacaggcctgagggtggaaagtccagatcagttagctgatgtgttgagacaagggatgaatgccgagggaccggtaatcatagatgtgccagttgactactcagacaatattaatttggcttctgataaacttcctaaagagtttggcgagctaatgaagaccaaagccttataaggatccataaaaaacacgctttttcagttcgagtttatcattatcaatactgccatttcaaagaatacgtaaataattaatagtagtgattttcctaactttatttagtcaaaaaattagccttttaattctgctgtaacccgtacatgcccaaaatagggggcgggttacacagaatatataacatcgtaggtgtctgggtgaacagtttattcctggcatccactaaatataatggagcccgctttttaagctggcatccagaaaaaaaaagaatcccagcaccaaaatattgttttcttcaccaaccatcagttcataggtccattctcttagcgcaactacagagaacaggggcacaaacaggcaaaaaacgggcacaacctcaatggagtgatgcaacctgcctggagtaaatgatgacacaaggcaattgacccacgcatgtatctatctcattttcttacaccttctattaccttctgctctctctgatttggaaaaagctgaaaaaaaaggttgaaaccagttccctgaaattattcccctacttgactaataagtatataaagacggtaggtattgattgtaattctgtaaatctatttcttaaacttcttaaattctacttttatagttagtcttttttttagttttaaaacaccaagaacttagtttcgaataaacacacataaacaaacaaaaagcttatggcacctgttacaattgaaaagttcgtaaatcaagaagaacgacaccttgtttccaaccgatcagcaacaattccgtttggtgaatacatatttaaaagattgttgtccatcgatacgaaatcagttttcggtgttcctggtgacttcaacttatctctattagaatatctctattcacctagtgttgaatcagctggcctaagatgggtcggcacgtgtaatgaactgaacgccgcttatgcggccgacggatattcccgttactctaataagattggctgtttaataaccacgtatggcgttggtgaattaagcgccttgaacggtatagccggttcgttcgctgaaaatgtcaaagttttgcacattgttggtgtggccaagtccatagattcgcgttcaagtaactttagtgatcggaacctacatcatttggtcccacagctacatgattcaaattttaaagggccaaatcataaagtatatcatgatatggtaaaagatagagtcgcttgctcggtagcctacttggaggatattgaaactgcatgtgaccaagtcgataatgttatccgcgatatttacaagtattctaaacctggttatatttttgttcctgcagattttgcggatatgtctgttacatgtgataatttggttaatgttccacgtatatctcaacaagattgtatagtatacccttctgaaaaccaattgtctgacataatcaacaagattactagttggatatattccagtaaaacacctgcgatccttggagacgtactgactgataggtatggtgtgagtaactttttgaacaagcttatctgcaaaactgggatttggaatttttccactgttatgggaaaatctgtaattgatgagtcaaacccaacttatatgggtcaatataatggtaaagaaggtttaaaacaagtctatgaacattttgaactgtgcgacttggtcttgcattttggagtcgacatcaatgaaattaataatgggcattatacttttacttataaaccaaatgctaaaatcattcaatttcatccgaattatattcgccttgtggacactaggcagggcaatgagcaaatgttcaaaggaatcaattttgcccctattttaaaagaactatacaagcgcattgacgtttctaaactttctttgcaatatgattcaaatgtaactcaatatacgaacgaaacaatgcggttagaagatcctaccaatggacaatcaagcattattacacaagttcacttacaaaagacgatgcctaaatttttgaaccctggtgatgttgtcgtttgtgaaacaggctcttttcaattctctgttcgtgatttcgcgtttccttcgcaattaaaatatatatcgcaaggatttttcctttccattggcatggcccttcctgccgccctaggtgttggaattgccatgcaagaccactcaaacgctcacatcaatggtggcaacgtaaaagaggactataagccaagattaattttgtttgaaggtgacggtgcagcacagatgacaatccaagaactgagcaccattctgaagtgcaatattccactagaagttatcatttggaacaataacggctacactattgaaagagccatcatgggccctaccaggtcgtataacgacgttatgtcttggaaatggaccaaactatttgaagcattcggagacttcgacggaaagtatactaatagcactctcattcaatgtccctctaaattagcactgaaattggaggagcttaagaattcaaacaaaagaagcgggatagaacttttagaagtcaaattaggcgaattggatttccccgaacagctaaagtgcatggttgaagcagcggcacttaaaagaaataaaaaagtgacacatggttataatgtgcagcgatacaatcagttacgtaaaaattttggattttatagagcatattcttcactaagaggttgtaagagcgttttcagacgtatataggctaggtcatgtaattagttatgtcacgcttacattcacgccctccccccacatccgctctaaccgaaaaggaaggagttagacaacctgaagtctaggtccctatttatttttttatagttatgttagtattaagaacgttatttatatttcaaatttttcttttttttctgtacagacgcgtgtacgcatgtaacattatactgaaaaccttgcttgagaaggttttgggacgctcgaaggctttaatttgcgggtgtacaatatggacttcctcttttctggcaaccaaacccatacatcgggattcctataataccttcgttggtctccctaacatgtaggtggcggaggggagatatacaatagaacagataccagacaagacataatgggctaaacaagactacaccaattacactgcctcattgatggtggtacataacgaactaatactgtagccctagacttgatagccatcatcatatcgaagtttcactaccctttttccatttgccatctattgaagtaataataggcgcatgcaacttcttttctttttttttcttttctctctcccccgttgttgtctcaccatatccgcaatgacaaaaaaatgatggaagacactaaaggaaaaaattaacgacaaagacagcaccaacagatgtcgttgttccagagctgatgaggggtatctcgaagcacacgaaactttttccttccttcattcacgcacactactctctaatgagcaacggtatacggccttccttccagttacttgaatttgaaataaaaaaaagtttgctgtcttgctatcaagtataaatagacctgcaattattaatcttttgtttcctcgtcattgttctcgttccctttcttccttgtttctttttctgcacaatatttcaagctataccaagcatacaatcaactatctcatatacacatatgttgagaacgtcaacattgttcaccaggcgtgtccaaccaagcctattttctagaaacattcttagattgcaatccacagctgcattatatccagagaaattccaaggcattggtatctccaacgcaaaggattggaagcatcctaaacttgttagtttcgaccccaaacctttcggtgaccatgacgttgatgttgagattgaagcatgtggaatatgtgggagcgattttcatattgcagtaggcaattggggccctgttccggaaaatcaaattttgggtcacgaaattattggtagggtagtgaaggtgggttcaaaatgtcacacgggtgttaagattggtgatagggttggtgtaggtgcccaagcattggcttgtttcgaatgcgaaagatgcaaaagtgataacgaacaatactgtaccaacgatcatgttctaacaatgtggactccttacaaagatggatacatatctcaaggtggatttgcatcacatgttagattgcatgagcattttgcaattcaaattccggagaatatcccatcacctttggctgcaccattattgtgtgggggaataacagtgtttagtcctttattgagaaacggttgtggacctggtaagcgtgtggggattgttggcataggtggtattggtcacatggggatattactagctaaggccatgggagccgaagtttatgcgttcagtagaggacactccaagcgtgaagacagtatgaagttaggggcggaccattatattgccatgttggaggataaaggctggaccgaacaatattcaaatgctcttgatctgttagttgtgtgtagttcttctcttagtaaagttaattttgactcgattgtgaaaataatgaagattggcggctccattgtttccattgctgctccagaagttaacgagaagctggtactaaaaccactgggtctgatgggggtatctatctcatcttctgctatcggttcaagaaaagaaatagaacagctattaaagctagtcagcgagaaaaatgtgaagatttgggtagagaagctacccataagcgaggagggtgtatctcacgcatttacgagaatggaatccggagatgttaagtacaggtttacacttgtagactatgacaagaaattccataagtgagcggccgcataacaatactgacagtactaaataattgcctacttggcttcacatacgttgcatacgtcgatatagataataatgataatgacagcaggattatcgtaatacgtaatagttgaaaatctcaaaaatgtgtgggtcattacgtaaataatgataggaatgggattcttctatttttcctttttccattctagcagccgtcgggaaaacgtggcatcctctctttcgggctcaattggagtcacgctgccgtgagcatcctctctttccatatctaacaactgagcacgtaaccaatggaaaagcatgagcttagcgttgctccaaaaaagtattggatggttaataccatttgtctgttctcttctgactttgactcctcaaaaaaaaaaaatctacaatcaacagatcgcttcaattacgccctcacaaaaacttttttccttcttcttcgcccacgttaaattttatccctcatgttgtctaacggatttctgcacttgatttattataaaaagacaaagacataatacttctctatcaatttcagttattgttcttccttgcgttattcttctgttcttctttttcttttgtcatatataaccataaccaagtaatacatattcaaactcgagatgtccaaagctacttataaagaaagggctgcaacccatccatccccagtggcagctaaactgtttaacataatgcacgaaaaacaaactaacttatgcgcatcattagatgtaagaactactaaagagctactggagttggttgaggctttaggtccaaaaatttgtttgttgaagacacatgttgacatattaacagatttttctatggagggtaccgttaagcctctgaaagcgttaagcgcgaaatataactttcttttatttgaagaccgtaagtttgctgatattggaaatactgttaagttgcaatatagcgcaggagtttatagaattgccgaatgggctgacattacgaatgcccacggtgttgtaggtcctggcattgtgtctggattgaaacaagcggcagaggaagtgactaaggaaccaagaggtttactaatgctggcggaattatcttgcaaaggctctctagccaccggtgaatatacaaaaggtactgtggatattgcaaagtctgataaggacttcgtaatcggttttattgcacaaagagatatgggaggtcgtgagaattcaaaatgaagtgaagttcctatactttctagagaataggaacttctatagtgagtcgaataagggcgacacaaaatttattctaaatgcataataaatactgataacatcttatagtttgtattatattttgtattatcgttgacatgtataattttgatatcaaaaactgattttccctttattattttcgagatttattttcttaattctctttaacaaactagaaatattgtatatacaaaaaatcataaataatagatgaatagtttaattataggtgttcatcaatcgaaaaagcaacgtatcttatttaaagtgcgttgcttttttctcatttataaggttaaataattctcatatatcaagcaaagtgacaggcgcccttaaatattctgacaaatgctctttccctaaactccccccataaaaaaacccgccgaagcgggtttttacgttatttgcggattaacgattactcgttatcagaaccgcccagggggcccgagcttaagactggccgtcgttttacaacacagaaagagtttgtagaaacgcaaaaaggccatccgtcaggggccttctgcttagtttgatgcctggcagttccctactctcgccttccgcttcctcgctcactgactcgctgcgctcggtcgttcggctgcggcgagcggtatcagctcactcaaaggcggtaatacggttatccacagaatcaggggataacgcaggaaagaacatgtgagcaaaaggccagcaaaaggccaggaaccgtaaaaaggccgcgttgctggcgtttttccataggctccgcccccctgacgagcatcacaaaaatcgacgctcaagtcagaggtggcgaaacccgacaggactataaagataccaggcgtttccccctggaagctccctcgtgcgctctcctgttccgaccctgccgcttaccggatacctgtccgcctttctcccttcgggaagcgtggcgctttctcatagctcacgctgtaggtatctcagttcggtgtaggtcgttcgctccaagctgggctgtgtgcacgaaccccccgttcagcccgaccgctgcgccttatccggtaactatcgtcttgagtccaacccggtaagacacgacttatcgccactggcagcagccactggtaacaggattagcagagcgaggtatgtaggcggtgctacagagttcttgaagtggtgggctaactacggctacactagaagaacagtatttggtatctgcgctctgctgaagccagttaccttcggaaaaagagttggtagctcttgatccggcaaacaaaccaccgctggtagcggtggtttttttgtttgcaagcagcagattacgcgcagaaaaaaaggatctcaagaagatcctttgatcttttctacggggtctgacgctcagtggaacgacgcgcgcgtaactcacgttaagggattttggtcatgagcttgcgccgtcccgtcaagtcagcgtaatgctctgcttt

SEQ ID NO: 36 - DNA, 11446 bp, Artificial Sequence
  Plasmid pGV6104
tagaaaaactcatcgagcatcaaatgaaactgcaatttattcatatcaggattatcaataccatatttttgaaaaagccgtttctgtaatgaaggagaaaactcaccgaggcagttccataggatggcaagatcctggtatcggtctgcgattccgactcgtccaacatcaatacaacctattaatttcccctcgtcaaaaataaggttatcaagtgagaaatcaccatgagtgacgactgaatccggtgagaatggcaaaagtttatgcatttctttccagacttgttcaacaggccagccattacgctcgtcatcaaaatcactcgcatcaaccaaaccgttattcattcgtgattgcgcctgagcgaggcgaaatacgcgatcgctgttaaaaggacaattacaaacaggaatcgagtgcaaccggcgcaggaacactgccagcgcatcaacaatattttcacctgaatcaggatattcttctaatacctggaacgctgtttttccggggatcgcagtggtgagtaaccatgcatcatcaggagtacggataaaatgcttgatggtcggaagtggcataaattccgtcagccagtttagtctgaccatctcatctgtaacatcattggcaacgctacctttgccatgtttcagaaacaactctggcgcatcgggcttcccatacaagcgatagattgtcgcacctgattgcccgacattatcgcgagcccatttatacccatataaatcagcatccatgttggaatttaatcgcggcctcgacgtttcccgttgaatatggctcatattcttcctttttcaatattattgaagcatttatcagggttattgtctcatgagcggatacatatttgaatgtatttagaaaaataaacaaataggggtcagtgttacaaccaattaaccaattctgaacattatcgcgagcccatttatacctgaatatggctcataacaccccttgtttgcctggcggcagtagcgcggtggtcccacctgaccccatgccgaactcagaagtgaaacgccgtagcgccgatggtagtgtggggactccccatgcgagagtagggaactgccaggcatcaaataaaacgaaaggctcagtcgaaagactgggcctttcgcccgggctaattagggggtgtcgcccttattcgactctatagtgaagttcctattctctagaaagtataggaacttctgaagtggggattcagctgaggtatttctttttacaggattgcgcttccagtaaattcggtctgttccattgcgacttgttgaatggcattggcgatgccaatgcccaattccatgggcaacgagtaagtaagtctcttctacatcgtcctattcctttcctaatgtgagctctttttaccttttggtacccatacaacgagtgtcatggggagaggaagaggaagattttagatgtagtgaaagtgaatagatgaaatgggaaatgggcgtgtggtgcggtttctgtggtatagaaaatcggaaatgagagtcaaccaaggtaaaaggtgggataatttcatggtattggaaattattcaaattagctaaccattgctggcccttgtgcgtgtcctgtattttgcatattctgtatttgctatgtagaaccatgggatagattatgcaatatttgtgaaaagattcaaccttttaaggtgtatacgtagtattggcccatgaatatcttaaggttggaatagtagtaccacttgtgtcaattatccattaaggggggagagtgaggtgagaggcagggctggctgggtggtgaatatgacctttctattttttttagttaactcagataaagtataaatacatgggcatgattatctgtaatggctagagtttcccatcatgtcttaatcataatcttaattatatacttttgattacctcaaaaaccatccactaaagccaaacatattatagtattaactattaatattaaggataaaactacaactcaaaaccaacttaaattacagtcgagatgctttcactacgtcaatctataagatttttcaagccagccacaagaactttgtgtagctctagatatctgcttcagcaaaaacccgtggtgatgttgactaaagctacaaaagagcagaaatcattggtgaaaaataggggtgcagaacttgttgtggactgtttggtagaacagggcgtaacacatgtttttggtatcccaggtgcaaaaatcgacgccgtgtttgatgcattacaagacaagggtccagaaattattgttgctagacatgagcaaaatgccgcatttatggcgcaagctgtaggtaggcttacaggtaaacctggtgttgtcctagttacgtctggcccaggagcctccaatttagcaactggtctattgacagctaatactgagggagatcctgtagttgcgttagccggtaatgtaattagagctgataggcttaagagaactcaccagtctctagacaacgctgctttattccaaccgatcaccaagtactcagtagaggtacaagacgtaaagaatatacctgaagctgtgacaaacgcatttcgtatagcttctgctggtcaggctggtgccgcgtttgtttcttttcctcaagacgttgtcaatgaagtgaccaatactaaaaacgttagagcggttgcagcccctaaactaggtccagccgcagacgacgcaattagcgctgcaattgctaaaattcagacggcgaaactaccagtagtccttgtcggtatgaagggcggaagaccagaagcaataaaagctgttcgtaagttattgaagaaagtccaattacctttcgttgagacttaccaagcagcaggtactttatctagagatttagaggatcagtattttggaaggataggtctatttagaaaccaaccaggagatttactattagaacaagctgatgttgtacttactatcggttatgatcctatagagtatgacccaaagttttggaacataaatggggatagaacaattatacatctagacgagataatcgccgacatcgatcacgcttatcaaccagatttagaactaatcggagatatcccgtcaacaatcaatcatattgaacatgatgctgtaaaggttgagttcgctgaacgtgagcagaaaatcttatctgatctaaagcaatatatgcatgagggtgaacaagttccagcagactggaaatctgaccgtgcacatcctttggaaatcgttaaggaactaagaaatgcggtcgatgatcatgtgactgttacatgtgatatcggttcacatgcaatttggatgtcacgttattttaggagctacgaaccattaactttaatgatatctaacgggatgcaaactctgggggttgcacttccttgggctattggcgctagtttagttaagcccggtgagaaggtggtatcggtatcaggtgatggtggctttctgttttcggctatggaattagaaactgcagtccgtttaaaagctcccattgtgcatattgtctggaatgattctacttacgacatggttgcttttcaacagttgaagaaatacaatagaacttcggctgtagactttggtaacatcgatattgtgaaatatgctgagtcttttggcgcaacaggcctgagggtggaaagtccagatcagttagctgatgtgttgagacaagggatgaatgccgagggaccggtaatcatagatgtgccagttgactactcagacaatattaatttggcttctgataaacttcctaaagagtttggcgagctaatgaagaccaaagccttataaggatccataaaaaacacgctttttcagttcgagtttatcattatcaatactgccatttcaaagaatacgtaaataattaatagtagtgattttcctaactttatttagtcaaaaaattagccttttaattctgctgtaacccgtacatgcccaaaatagggggcgggttacacagaatatataacatcgtaggtgtctgggtgaacagtttattcctggcatccactaaatataatggagcccgctttttaagctggcatccagaaaaaaaaagaatcccagcaccaaaatattgttttcttcaccaaccatcagttcataggtccattctcttagcgcaactacagagaacaggggcacaaacaggcaaaaaacgggcacaacctcaatggagtgatgcaacctgcctggagtaaatgatgacacaaggcaattgacccacgcatgtatctatctcattttcttacaccttctattaccttctgctctctctgatttggaaaaagctgaaaaaaaaggttgaaaccagttccctgaaattattcccctacttgactaataagtatataaagacggtaggtattgattgtaattctgtaaatctatttcttaaacttcttaaattctacttttatagttagtcttttttttagttttaaaacaccaagaacttagtttcgaataaacacacataaacaaacaaaaagcttatggcacctgttacaattgaaaagttcgtaaatcaagaagaacgacaccttgtttccaaccgatcagcaacaattccgtttggtgaatacatatttaaaagattgttgtccatcgatacgaaatcagttttcggtgttcctggtgacttcaacttatctctattagaatatctctattcacctagtgttgaatcagctggcctaagatgggtcggcacgtgtaatgaactgaacgccgcttatgcggccgacggatattcccgttactctaataagattggctgtttaataaccacgtatggcgttggtgaattaagcgccttgaacggtatagccggttcgttcgctgaaaatgtcaaagttttgcacattgttggtgtggccaagtccatagattcgcgttcaagtaactttagtgatcggaacctacatcatttggtcccacagctacatgattcaaattttaaagggccaaatcataaagtatatcatgatatggtaaaagatagagtcgcttgctcggtagcctacttggaggatattgaaactgcatgtgaccaagtcgataatgttatccgcgatatttacaagtattctaaacctggttatatttttgttcctgcagattttgcggatatgtctgttacatgtgataatttggttaatgttccacgtatatctcaacaagattgtatagtatacccttctgaaaaccaattgtctgacataatcaacaagattactagttggatatattccagtaaaacacctgcgatccttggagacgtactgactgataggtatggtgtgagtaactttttgaacaagcttatctgcaaaactgggatttggaatttttccactgttatgggaaaatctgtaattgatgagtcaaacccaacttatatgggtcaatataatggtaaagaaggtttaaaacaagtctatgaacattttgaactgtgcgacttggtcttgcattttggagtcgacatcaatgaaattaataatgggcattatacttttacttataaaccaaatgctaaaatcattcaatttcatccgaattatattcgccttgtggacactaggcagggcaatgagcaaatgttcaaaggaatcaattttgcccctattttaaaagaactatacaagcgcattgacgtttctaaactttctttgcaatatgattcaaatgtaactcaatatacgaacgaaacaatgcggttagaagatcctaccaatggacaatcaagcattattacacaagttcacttacaaaagacgatgcctaaatttttgaaccctggtgatgttgtcgtttgtgaaacaggctcttttcaattctctgttcgtgatttcgcgtttccttcgcaattaaaatatatatcgcaaggatttttcctttccattggcatggcccttcctgccgccctaggtgttggaattgccatgcaagaccactcaaacgctcacatcaatggtggcaacgtaaaagaggactataagccaagattaattttgtttgaaggtgacggtgcagcacagatgacaatccaagaactgagcaccattctgaagtgcaatattccactagaagttatcatttggaacaataacggctacactattgaaagagccatcatgggccctaccaggtcgtataacgacgttatgtcttggaaatggaccaaactatttgaagcattcggagacttcgacggaaagtatactaatagcactctcattcaatgtccctctaaattagcactgaaattggaggagcttaagaattcaaacaaaagaagcgggatagaacttttagaagtcaaattaggcgaattggatttccccgaacagctaaagtgcatggttgaagcagcggcacttaaaagaaataaaaaagtgacacatggttataatgtgcagcgatacaatcagttacgtaaaaattttggattttatagagcatattcttcactaagaggttgtaagagcgttttcagacgtatataggctagctaggtcatgtaattagttatgtcacgcttacattcacgccctccccccacatccgctctaaccgaaaaggaaggagttagacaacctgaagtctaggtccctatttatttttttatagttatgttagtattaagaacgttatttatatttcaaatttttcttttttttctgtacagacgcgtgtacgcatgtaacattatactgaaaaccttgcttgagaaggttttgggacgctcgaaggctttaatttgcgggtgtacaatatggacttcctcttttctggcaaccaaacccatacatcgggattcctataataccttcgttggtctccctaacatgtaggtggcggaggggagatatacaatagaacagataccagacaagacataatgggctaaacaagactacaccaattacactgcctcattgatggtggtacataacgaactaatactgtagccctagacttgatagccatcatcatatcgaagtttcactaccctttttccatttgccatctattgaagtaataataggcgcatgcaacttcttttctttttttttcttttctctctcccccgttgttgtctcaccatatccgcaatgacaaaaaaatgatggaagacactaaaggaaaaaattaacgacaaagacagcaccaacagatgtcgttgttccagagctgatgaggggtatctcgaagcacacgaaactttttccttccttcattcacgcacactactctctaatgagcaacggtatacggccttccttccagttacttgaatttgaaataaaaaaaagtttgctgtcttgctatcaagtataaatagacctgcaattattaatcttttgtttcctcgtcattgttctcgttccctttcttccttgtttctttttctgcacaatatttcaagctataccaagcatacaatcaactatctcatatacacatatgttgagaacgtcaacattgttcaccaggcgtgtccaaccaagcctattttctagaaacattcttagattgcaatccacagctgcattatatccagagaaattccaaggcattggtatctccaacgcaaaggattggaagcatcctaaacttgttagtttcgaccccaaacctttcggtgaccatgacgttgatgttgagattgaagcatgtggaatatgtgggagcgattttcatattgcagtaggcaattggggccctgttccggaaaatcaaattttgggtcacgaaattattggtagggtagtgaaggtgggttcaaaatgtcacacgggtgttaagattggtgatagggttggtgtaggtgcccaagcattggcttgtttcgaatgcgaaagatgcaaaagtgataacgaacaatactgtaccaacgatcatgttctaacaatgtggactccttacaaagatggatacatatctcaaggtggatttgcatcacatgttagattgcatgagcattttgcaattcaaattccggagaatatcccatcacctttggctgcaccattattgtgtgggggaataacagtgtttagtcctttattgagaaacggttgtggacctggtaagcgtgtggggattgttggcataggtggtattggtcacatggggatattactagctaaggccatgggagccgaagtttatgcgttcagtagaggacactccaagcgtgaagacagtatgaagttaggggcggaccattatattgccatgttggaggataaaggctggaccgaacaatattcaaatgctcttgatctgttagttgtgtgtagttcttctcttagtaaagttaattttgactcgattgtgaaaataatgaagattggcggctccattgtttccattgctgctccagaagttaacgagaagctggtactaaaaccactgggtctgatgggggtatctatctcatcttctgctatcggttcaagaaaagaaatagaacagctattaaagctagtcagcgagaaaaatgtgaagatttgggtagagaagctacccataagcgaggagggtgtatctcacgcatttacgagaatggaatccggagatgttaagtacaggtttacacttgtagactatgacaagaaattccataagtgagcggccgcataacaatactgacagtactaaataattgcctacttggcttcacatacgttgcatacgtcgatatagataataatgataatgacagcaggattatcgtaatacgtaatagttgaaaatctcaaaaatgtgtgggtcattacgtaaataatgataggaatgggattcttctatttttcctttttccattctagcagccgtcgggaaaacgtggcatcctctctttcgggctcaattggagtcacgctgccgtgagcatcctctctttccatatctaacaactgagcacgtaaccaatggaaaagcatgagcttagcgttgctccaaaaaagtattggatggttaataccatttgtctgttctcttctgactttgactcctcaaaaaaaaaaaatctacaatcaacagatcgcttcaattacgccctcacaaaaacttttttccttcttcttcgcccacgttaaattttatccctcatgttgtctaacggatttctgcacttgatttattataaaaagacaaagacataatacttctctatcaatttcagttattgttcttccttgcgttattcttctgttcttctttttcttttgtcatatataaccataaccaagtaatacatattcaaactcgagatgtccaaagctacttataaagaaagggctgcaacccatccatccccagtggcagctaaactgtttaacataatgcacgaaaaacaaactaacttatgcgcatcattagatgtaagaactactaaagagctactggagttggttgaggctttaggtccaaaaatttgtttgttgaagacacatgttgacatattaacagatttttctatggagggtaccgttaagcctctgaaagcgttaagcgcgaaatataactttcttttatttgaagaccgtaagtttgctgatattggaaatactgttaagttgcaatatagcgcaggagtttatagaattgccgaatgggctgacattacgaatgcccacggtgttgtaggtcctggcattgtgtctggattgaaacaagcggcagaggaagtgactaaggaaccaagaggtttactaatgctggcggaattatcttgcaaaggctctctagccaccggtgaatatacaaaaggtactgtggatattgcaaagtctgataaggacttcgtaatcggttttattgcacaaagagatatgggaggtcgtgagaattcaaaatgaagtgaagttcctatactttctagagaataggaacttctatagtgagtcgaataagggcgacacaaaatttattctaaatgcataataaatactgataacatcttatagtttgtattatattttgtattatcgttgacatgtataattttgatatcaaaaactgattttccctttattattttcgagatttattttcttaattctctttaacaaactagaaatattgtatatacaaaaaatcataaataatagatgaatagtttaattataggtgttcatcaatcgaaaaagcaacgtatcttatttaaagtgcgttgcttttttctcatttataaggttaaataattctcatatatcaagcaaagtgacaggcgcccttaaatattctgacaaatgctctttccctaaactccccccataaaaaaacccgccgaagcgggtttttacgttatttgcggattaacgattactcgttatcagaaccgcccagggggcccgagcttaagactggccgtcgttttacaacacagaaagagtttgtagaaacgcaaaaaggccatccgtcaggggccttctgcttagtttgatgcctggcagttccctactctcgccttccgcttcctcgctcactgactcgctgcgctcggtcgttcggctgcggcgagcggtatcagctcactcaaaggcggtaatacggttatccacagaatcaggggataacgcaggaaagaacatgtgagcaaaaggccagcaaaaggccaggaaccgtaaaaaggccgcgttgctggcgtttttccataggctccgcccccctgacgagcatcacaaaaatcgacgctcaagtcagaggtggcgaaacccgacaggactataaagataccaggcgtttccccctggaagctccctcgtgcgctctcctgttccgaccctgccgcttaccggatacctgtccgcctttctcccttcgggaagcgtggcgctttctcatagctcacgctgtaggtatctcagttcggtgtaggtcgttcgctccaagctgggctgtgtgcacgaaccccccgttcagcccgaccgctgcgccttatccggtaactatcgtcttgagtccaacccggtaagacacgacttatcgccactggcagcagccactggtaacaggattagcagagcgaggtatgtaggcggtgctacagagttcttgaagtggtgggctaactacggctacactagaagaacagtatttggtatctgcgctctgctgaagccagttaccttcggaaaaagagttggtagctcttgatccggcaaacaaaccaccgctggtagcggtggtttttttgtttgcaagcagcagattacgcgcagaaaaaaaggatctcaagaagatcctttgatcttttctacggggtctgacgctcagtggaacgacgcgcgcgtaactcacgttaagggattttggtcatgagcttgcgccgtcccgtcaagtcagcgtaatgctctgcttt

SEQ ID NO: 37 - DNA, 11436 bp, Artificial Sequence
  Plasmid pGV6105
tagaaaaactcatcgagcatcaaatgaaactgcaatttattcatatcaggattatcaataccatatttttgaaaaagccgtttctgtaatgaaggagaaaactcaccgaggcagttccataggatggcaagatcctggtatcggtctgcgattccgactcgtccaacatcaatacaacctattaatttcccctcgtcaaaaataaggttatcaagtgagaaatcaccatgagtgacgactgaatccggtgagaatggcaaaagtttatgcatttctttccagacttgttcaacaggccagccattacgctcgtcatcaaaatcactcgcatcaaccaaaccgttattcattcgtgattgcgcctgagcgaggcgaaatacgcgatcgctgttaaaaggacaattacaaacaggaatcgagtgcaaccggcgcaggaacactgccagcgcatcaacaatattttcacctgaatcaggatattcttctaatacctggaacgctgtttttccggggatcgcagtggtgagtaaccatgcatcatcaggagtacggataaaatgcttgatggtcggaagtggcataaattccgtcagccagtttagtctgaccatctcatctgtaacatcattggcaacgctacctttgccatgtttcagaaacaactctggcgcatcgggcttcccatacaagcgatagattgtcgcacctgattgcccgacattatcgcgagcccatttatacccatataaatcagcatccatgttggaatttaatcgcggcctcgacgtttcccgttgaatatggctcatattcttcctttttcaatattattgaagcatttatcagggttattgtctcatgagcggatacatatttgaatgtatttagaaaaataaacaaataggggtcagtgttacaaccaattaaccaattctgaacattatcgcgagcccatttatacctgaatatggctcataacaccccttgtttgcctggcggcagtagcgcggtggtcccacctgaccccatgccgaactcagaagtgaaacgccgtagcgccgatggtagtgtggggactccccatgcgagagtagggaactgccaggcatcaaataaaacgaaaggctcagtcgaaagactgggcctttcgcccgggctaattagggggtgtcgcccttattcgactctatagtgaagttcctattctctagaaagtataggaacttctgaagtggggattcagctgaggtatttctttttacaggattgcgcttccagtaaattcggtctgttccattgcgacttgttgaatggcattggcgatgccaatgcccaattccatgggcaacgagtaagtaagtctcttctacatcgtcctattcctttcctaatgtgagctctttttaccttttggtacccatacaacgagtgtcatggggagaggaagaggaagattttagatgtagtgaaagtgaatagatgaaatgggaaatgggcgtgtggtgcggtttctgtggtatagaaaatcggaaatgagagtcaaccaaggtaaaaggtgggataatttcatggtattggaaattattcaaattagctaaccattgctggcccttgtgcgtgtcctgtattttgcatattctgtatttgctatgtagaaccatgggatagattatgcaatatttgtgaaaagattcaaccttttaaggtgtatacgtagtattggcccatgaatatcttaaggttggaatagtagtaccacttgtgtcaattatccattaaggggggagagtgaggtgagaggcagggctggctgggtggtgaatatgacctttctattttttttagttaactcagataaagtataaatacatgggcatgattatctgtaatggctagagtttcccatcatgtcttaatcataatcttaattatatacttttgattacctcaaaaaccatccactaaagccaaacatattatagtattaactattaatattaaggataaaactacaactcaaaaccaacttaaattacagtcgagatgatcagacaatctacgctaaaaaacttcgctattaagcgttgctttcaacatatagcataccgcaacacacctgccatgagatcagtagctctcgcgcagcgcttttatagttcgtcttcccgttattacagtgcgtctccattaccagcctctaaaaggccagagcctgctccaagtttcaatgttgatccattagaacagcccgctgaaccttcaaaattggctaagaaactacgcgctgagcctgacatggatacctctttcgtcggtttaactggtggtcaaatatttaacgaaatgatgtccagacaaaacgttgatactgtatttggttatccaggtggtgctatcctacctgtttacgatgccattcataacagtgataaattcaacttcgttcttccaaaacacgaacaaggtgccggtcacatggcagaaggctacgccagagcttctggtaaaccaggtgttgtcttggttacttctgggccaggtgccaccaatgtcgttactccaatggcagatgcctttgcagacgggattccaatggttgtctttacagggcaagtcccaactagtgctatcggtactgatgctttccaagaggctgacgtcgttggtatttctagatcttgtacgaaatggaatgtcatggtcaagtccgtggaagaattgccattgcgtattaacgaggcttttgaaattgccacgagcggtagaccgggaccagtcttggtcgatttaccaaaggatgttacagcagctatcttaagaaatccaattccaacaaaaacaactcttccatcaaacgcactaaaccaattaaccagtcgcgcacaagatgaatttgtcatgcaaagtatcaataaagcagcagatttgatcaacttggcaaagaaacctgtcttatacgtcggtgctggtattttaaaccatgcagatggtccaagattactaaaagaattaagtgaccgtgctcaaatacctgtcaccactactttacaaggtttaggttcattcgaccaagaagatccaaaatcattggatatgcttggtatgcacggttgtgctactgccaacctggcagtgcaaaatgccgacttgataattgcagttggtgctagattcgacgaccgtgtcactggtaatatttctaaattcgctccagaagctcgtcgtgcagctgccgagggtagaggtggtattattcatttcgaggttagtccaaaaaacataaacaaggttgttcaaactcaaatagcagtggaaggtgatgctacgaccaatctgggcaaaatgatgtcaaagattttcccagttaaggagaggtctgaatggtttgctcaaataaataaatggaagaaggaatacccatacgcttatatggaggagactccaggatctaaaattaaaccacagacggttataaagaaactatccaaggttgccaacgacacaggaagacatgtcattgttacaacgggtgtggggcaacatcaaatgtgggctgctcaacactggacatggagaaatccacatactttcatcacatcaggtggtttaggtacgatgggttacggtctccctgccgccatcggtgctcaagttgcaaagccagaatctttggttattgacattgatggtgacgcatcctttaacatgactctaacggaattgagttctgccgttcaagctggtactccagtgaagattttgattttgaacaatgaagagcaaggtatggttactcaatggcaatccctgttctacgaacatcgttattcccacacacatcaattgaaccctgatttcataaaactagcggaggctatgggtttaaaaggtttaagagtcaagaagcaagaggaattggacgctaagttgaaagaattcgtttctaccaagggcccagttttgcttgaagtggaagttgataaaaaagttcctgttttgccaatggtggcaggtggtagcggtctagacgagttcataaattttgacccagaagttgaaagacaacagactgaattacgtcataagcgtacaggcggtaagcactgaggatccataaaaaacacgctttttcagttcgagtttatcattatcaatactgccatttcaaagaatacgtaaataattaatagtagtgattttcctaactttatttagtcaaaaaattagccttttaattctgctgtaacccgtacatgcccaaaatagggggcgggttacacagaatatataacatcgtaggtgtctgggtgaacagtttattcctggcatccactaaatataatggagcccgctttttaagctggcatccagaaaaaaaaagaatcccagcaccaaaatattgttttcttcaccaaccatcagttcataggtccattctcttagcgcaactacagagaacaggggcacaaacaggcaaaaaacgggcacaacctcaatggagtgatgcaacctgcctggagtaaatgatgacacaaggcaattgacccacgcatgtatctatctcattttcttacaccttctattaccttctgctctctctgatttggaaaaagctgaaaaaaaaggttgaaaccagttccctgaaattattcccctacttgactaataagtatataaagacggtaggtattgattgtaattctgtaaatctatttcttaaacttcttaaattctacttttatagttagtcttttttttagttttaaaacaccaagaacttagtttcgaataaacacacataaacaaacaaaaagcttatgtatactgttggagattatttgttagatagattgcatgaactaggcattgaagaaattttcggagttcccggggattacaatctgcaatttctagaccagattatttcacataaagacatgaaatgggtcggaaatgcaaatgagttaaatgcatcttacatggccgatggttatgccagaaccaaaaaggcggctgctttcttgactaccttcggggtgggtgaattatcggcagttaatggcttggctggatcatacgcagaaaacttgcctgtcgttgaaatcgttggctcgccaacatcaaaagttcaaaatgaaggaaaattcgtccaccacactttggcagatggtgacttcaagcacttcatgaaaatgcatgaacctgtaacggctgccagaactctactaactgctgagaatgcaactgtagagattgatcgtgtcttgagcgctcttttaaaggaaagaaagccagtctatattaacctgccagtagacgtcgcagcggccaaagcagagaagcctagcttaccacttaaaaaggaaaatagtacctcaaacacttcagatcaagagattcttaacaagatccaggaatctttgaaaaacgctaaaaagcccattgttataactggccatgagatcatatcatttggtttggagaaaacagtgacccagttcattagtaagacgaaactgccaataaccactctaaatttcggtaagtcctccgttgatgaagcgttgcctagcttcttgggtatttacaacggcaccttgtcagaacccaatctgaaagaatttgttgaatctgcagactttatattgatgttgggagtaaagttgactgacagctctactggtgcttttacacaccatctgaatgaaaacaagatgatatctcttaatatcgatgaaggtaagatattcaatgaaagaatacagaacttcgacttcgagagtctaatttcttccttactggacttaagtgaaatcgagtataaaggtaagtacattgacaaaaagcaggaagattttgttccgagcaacgcgctacttagtcaagatagattatggcaagctgttgaaaatctgacacaatccaatgagacaattgttgccgaacaaggtacctccttttttggcgcttcttccatcttcctaaagtccaagtctcatttcatagggcagccattgtggggtagcatcggttacacctttcctgctgctctagggtcccaaattgctgataaagaaagtagacatttgttgtttataggagacggatctttacaattgacagttcaagagttaggtttagccatcagagagaagattaatcctatctgcttcataataaacaacgatggctatacagttgagagggaaattcatggacctaatcaatcttataatgatataccaatgtggaattatagcaagttacctgaatcttttggggctaccgaggatcgtgttgtttctaagattgtaagaaccgaaaatgaatttgtttctgttatgaaggaagcacaagcggaccctaacaggatgtactggattgagttaattcttgctaaggagggtgcgccaaaggttctaaagaagatgggtaagttgttcgccgaacaaaacaaatccgtgacacatggttataatgtgcagcgatacaatcagttacgtaaaaattttggattttatagagcatattcttcactaagaggttgtaagagcgttttcagacgtatataggctaggtcatgtaattagttatgtcacgcttacattcacgccctccccccacatccgctctaaccgaaaaggaaggagttagacaacctgaagtctaggtccctatttatttttttatagttatgttagtattaagaacgttatttatatttcaaatttttcttttttttctgtacagacgcgtgtacgcatgtaacattatactgaaaaccttgcttgagaaggttttgggacgctcgaaggctttaatttgcgggtgtacaatatggacttcctcttttctggcaaccaaacccatacatcgggattcctataataccttcgttggtctccctaacatgtaggtggcggaggggagatatacaatagaacagataccagacaagacataatgggctaaacaagactacaccaattacactgcctcattgatggtggtacataacgaactaatactgtagccctagacttgatagccatcatcatatcgaagtttcactaccctttttccatttgccatctattgaagtaataataggcgcatgcaacttcttttctttttttttcttttctctctcccccgttgttgtctcaccatatccgcaatgacaaaaaaatgatggaagacactaaaggaaaaaattaacgacaaagacagcaccaacagatgtcgttgttccagagctgatgaggggtatctcgaagcacacgaaactttttccttccttcattcacgcacactactctctaatgagcaacggtatacggccttccttccagttacttgaatttgaaataaaaaaaagtttgctgtcttgctatcaagtataaatagacctgcaattattaatcttttgtttcctcgtcattgttctcgttccctttcttccttgtttctttttctgcacaatatttcaagctataccaagcatacaatcaactatctcatatacacatatgttgagaacgtcaacattgttcaccaggcgtgtccaaccaagcctattttctagaaacattcttagattgcaatccacagctgcattatatccagagaaattccaaggcattggtatctccaacgcaaaggattggaagcatcctaaacttgttagtttcgaccccaaacctttcggtgaccatgacgttgatgttgagattgaagcatgtggaatatgtgggagcgattttcatattgcagtaggcaattggggccctgttccggaaaatcaaattttgggtcacgaaattattggtagggtagtgaaggtgggttcaaaatgtcacacgggtgttaagattggtgatagggttggtgtaggtgcccaagcattggcttgtttcgaatgcgaaagatgcaaaagtgataacgaacaatactgtaccaacgatcatgttctaacaatgtggactccttacaaagatggatacatatctcaaggtggatttgcatcacatgttagattgcatgagcattttgcaattcaaattccggagaatatcccatcacctttggctgcaccattattgtgtgggggaataacagtgtttagtcctttattgagaaacggttgtggacctggtaagcgtgtggggattgttggcataggtggtattggtcacatggggatattactagctaaggccatgggagccgaagtttatgcgttcagtagaggacactccaagcgtgaagacagtatgaagttaggggcggaccattatattgccatgttggaggataaaggctggaccgaacaatattcaaatgctcttgatctgttagttgtgtgtagttcttctcttagtaaagttaattttgactcgattgtgaaaataatgaagattggcggctccattgtttccattgctgctccagaagttaacgagaagctggtactaaaaccactgggtctgatgggggtatctatctcatcttctgctatcggttcaagaaaagaaatagaacagctattaaagctagtcagcgagaaaaatgtgaagatttgggtagagaagctacccataagcgaggagggtgtatctcacgcatttacgagaatggaatccggagatgttaagtacaggtttacacttgtagactatgacaagaaattccataagtgagcggccgcataacaatactgacagtactaaataattgcctacttggcttcacatacgttgcatacgtcgatatagataataatgataatgacagcaggattatcgtaatacgtaatagttgaaaatctcaaaaatgtgtgggtcattacgtaaataatgataggaatgggattcttctatttttcctttttccattctagcagccgtcgggaaaacgtggcatcctctctttcgggctcaattggagtcacgctgccgtgagcatcctctctttccatatctaacaactgagcacgtaaccaatggaaaagcatgagcttagcgttgctccaaaaaagtattggatggttaataccatttgtctgttctcttctgactttgactcctcaaaaaaaaaaaatctacaatcaacagatcgcttcaattacgccctcacaaaaacttttttccttcttcttcgcccacgttaaattttatccctcatgttgtctaacggatttctgcacttgatttattataaaaagacaaagacataatacttctctatcaatttcagttattgttcttccttgcgttattcttctgttcttctttttcttttgtcatatataaccataaccaagtaatacatattcaaactcgagatgtccaaagctacttataaagaaagggctgcaacccatccatccccagtggcagctaaactgtttaacataatgcacgaaaaacaaactaacttatgcgcatcattagatgtaagaactactaaagagctactggagttggttgaggctttaggtccaaaaatttgtttgttgaagacacatgttgacatattaacagatttttctatggagggtaccgttaagcctctgaaagcgttaagcgcgaaatataactttcttttatttgaagaccgtaagtttgctgatattggaaatactgttaagttgcaatatagcgcaggagtttatagaattgccgaatgggctgacattacgaatgcccacggtgttgtaggtcctggcattgtgtctggattgaaacaagcggcagaggaagtgactaaggaaccaagaggtttactaatgctggcggaattatcttgcaaaggctctctagccaccggtgaatatacaaaaggtactgtggatattgcaaagtctgataaggacttcgtaatcggttttattgcacaaagagatatgggaggtcgtgagaattcaaaatgaagtgaagttcctatactttctagagaataggaacttctatagtgagtcgaataagggcgacacaaaatttattctaaatgcataataaatactgataacatcttatagtttgtattatattttgtattatcgttgacatgtataattttgatatcaaaaactgattttccctttattattttcgagatttattttcttaattctctttaacaaactagaaatattgtatatacaaaaaatcataaataatagatgaatagtttaattataggtgttcatcaatcgaaaaagcaacgtatcttatttaaagtgcgttgcttttttctcatttataaggttaaataattctcatatatcaagcaaagtgacaggcgcccttaaatattctgacaaatgctctttccctaaactccccccataaaaaaacccgccgaagcgggtttttacgttatttgcggattaacgattactcgttatcagaaccgcccagggggcccgagcttaagactggccgtcgttttacaacacagaaagagtttgtagaaacgcaaaaaggccatccgtcaggggccttctgcttagtttgatgcctggcagttccctactctcgccttccgcttcctcgctcactgactcgctgcgctcggtcgttcggctgcggcgagcggtatcagctcactcaaaggcggtaatacggttatccacagaatcaggggataacgcaggaaagaacatgtgagcaaaaggccagcaaaaggccaggaaccgtaaaaaggccgcgttgctggcgtttttccataggctccgcccccctgacgagcatcacaaaaatcgacgctcaagtcagaggtggcgaaacccgacaggactataaagataccaggcgtttccccctggaagctccctcgtgcgctctcctgttccgaccctgccgcttaccggatacctgtccgcctttctcccttcgggaagcgtggcgctttctcatagctcacgctgtaggtatctcagttcggtgtaggtcgttcgctccaagctgggctgtgtgcacgaaccccccgttcagcccgaccgctgcgccttatccggtaactatcgtcttgagtccaacccggtaagacacgacttatcgccactggcagcagccactggtaacaggattagcagagcgaggtatgtaggcggtgctacagagttcttgaagtggtgggctaactacggctacactagaagaacagtatttggtatctgcgctctgctgaagccagttaccttcggaaaaagagttggtagctcttgatccggcaaacaaaccaccgctggtagcggtggtttttttgtttgcaagcagcagattacgcgcagaaaaaaaggatctcaagaagatcctttgatcttttctacggggtctgacgctcagtggaacgacgcgcgcgtaactcacgttaagggattttggtcatgagcttgcgccgtcccgtcaagtcagcgtaatgctctgcttt

SEQ ID NO: 38 - DNA, 11697 bp, Artificial Sequence
  Plasmid pGV6106
tagaaaaactcatcgagcatcaaatgaaactgcaatttattcatatcaggattatcaataccatatttttgaaaaagccgtttctgtaatgaaggagaaaactcaccgaggcagttccataggatggcaagatcctggtatcggtctgcgattccgactcgtccaacatcaatacaacctattaatttcccctcgtcaaaaataaggttatcaagtgagaaatcaccatgagtgacgactgaatccggtgagaatggcaaaagtttatgcatttctttccagacttgttcaacaggccagccattacgctcgtcatcaaaatcactcgcatcaaccaaaccgttattcattcgtgattgcgcctgagcgaggcgaaatacgcgatcgctgttaaaaggacaattacaaacaggaatcgagtgcaaccggcgcaggaacactgccagcgcatcaacaatattttcacctgaatcaggatattcttctaatacctggaacgctgtttttccggggatcgcagtggtgagtaaccatgcatcatcaggagtacggataaaatgcttgatggtcggaagtggcataaattccgtcagccagtttagtctgaccatctcatctgtaacatcattggcaacgctacctttgccatgtttcagaaacaactctggcgcatcgggcttcccatacaagcgatagattgtcgcacctgattgcccgacattatcgcgagcccatttatacccatataaatcagcatccatgttggaatttaatcgcggcctcgacgtttcccgttgaatatggctcatattcttcctttttcaatattattgaagcatttatcagggttattgtctcatgagcggatacatatttgaatgtatttagaaaaataaacaaataggggtcagtgttacaaccaattaaccaattctgaacattatcgcgagcccatttatacctgaatatggctcataacaccccttgtttgcctggcggcagtagcgcggtggtcccacctgaccccatgccgaactcagaagtgaaacgccgtagcgccgatggtagtgtggggactccccatgcgagagtagggaactgccaggcatcaaataaaacgaaaggctcagtcgaaagactgggcctttcgcccgggctaattagggggtgtcgcccttattcgactctatagtgaagttcctattctctagaaagtataggaacttctgaagtggggattcagctgaggtatttctttttacaggattgcgcttccagtaaattcggtctgttccattgcgacttgttgaatggcattggcgatgccaatgcccaattccatgggcaacgagtaagtaagtctcttctacatcgtcctattcctttcctaatgtgagctctttttaccttttggtacccatacaacgagtgtcatggggagaggaagaggaagattttagatgtagtgaaagtgaatagatgaaatgggaaatgggcgtgtggtgcggtttctgtggtatagaaaatcggaaatgagagtcaaccaaggtaaaaggtgggataatttcatggtattggaaattattcaaattagctaaccattgctggcccttgtgcgtgtcctgtattttgcatattctgtatttgctatgtagaaccatgggatagattatgcaatatttgtgaaaagattcaaccttttaaggtgtatacgtagtattggcccatgaatatcttaaggttggaatagtagtaccacttgtgtcaattatccattaaggggggagagtgaggtgagaggcagggctggctgggtggtgaatatgacctttctattttttttagttaactcagataaagtataaatacatgggcatgattatctgtaatggctagagtttcccatcatgtcttaatcataatcttaattatatacttttgattacctcaaaaaccatccactaaagccaaacatattatagtattaactattaatattaaggataaaactacaactcaaaaccaacttaaattacagtcgagatgatcagacaatctacgctaaaaaacttcgctattaagcgttgctttcaacatatagcataccgcaacacacctgccatgagatcagtagctctcgcgcagcgcttttatagttcgtcttcccgttattacagtgcgtctccattaccagcctctaaaaggccagagcctgctccaagtttcaatgttgatccattagaacagcccgctgaaccttcaaaattggctaagaaactacgcgctgagcctgacatggatacctctttcgtcggtttaactggtggtcaaatatttaacgaaatgatgtccagacaaaacgttgatactgtatttggttatccaggtggtgctatcctacctgtttacgatgccattcataacagtgataaattcaacttcgttcttccaaaacacgaacaaggtgccggtcacatggcagaaggctacgccagagcttctggtaaaccaggtgttgtcttggttacttctgggccaggtgccaccaatgtcgttactccaatggcagatgcctttgcagacgggattccaatggttgtctttacagggcaagtcccaactagtgctatcggtactgatgctttccaagaggctgacgtcgttggtatttctagatcttgtacgaaatggaatgtcatggtcaagtccgtggaagaattgccattgcgtattaacgaggcttttgaaattgccacgagcggtagaccgggaccagtcttggtcgatttaccaaaggatgttacagcagctatcttaagaaatccaattccaacaaaaacaactcttccatcaaacgcactaaaccaattaaccagtcgcgcacaagatgaatttgtcatgcaaagtatcaataaagcagcagatttgatcaacttggcaaagaaacctgtcttatacgtcggtgctggtattttaaaccatgcagatggtccaagattactaaaagaattaagtgaccgtgctcaaatacctgtcaccactactttacaaggtttaggttcattcgaccaagaagatccaaaatcattggatatgcttggtatgcacggttgtgctactgccaacctggcagtgcaaaatgccgacttgataattgcagttggtgctagattcgacgaccgtgtcactggtaatatttctaaattcgctccagaagctcgtcgtgcagctgccgagggtagaggtggtattattcatttcgaggttagtccaaaaaacataaacaaggttgttcaaactcaaatagcagtggaaggtgatgctacgaccaatctgggcaaaatgatgtcaaagattttcccagttaaggagaggtctgaatggtttgctcaaataaataaatggaagaaggaatacccatacgcttatatggaggagactccaggatctaaaattaaaccacagacggttataaagaaactatccaaggttgccaacgacacaggaagacatgtcattgttacaacgggtgtggggcaacatcaaatgtgggctgctcaacactggacatggagaaatccacatactttcatcacatcaggtggtttaggtacgatgggttacggtctccctgccgccatcggtgctcaagttgcaaagccagaatctttggttattgacattgatggtgacgcatcctttaacatgactctaacggaattgagttctgccgttcaagctggtactccagtgaagattttgattttgaacaatgaagagcaaggtatggttactcaatggcaatccctgttctacgaacatcgttattcccacacacatcaattgaaccctgatttcataaaactagcggaggctatgggtttaaaaggtttaagagtcaagaagcaagaggaattggacgctaagttgaaagaattcgtttctaccaagggcccagttttgcttgaagtggaagttgataaaaaagttcctgttttgccaatggtggcaggtggtagcggtctagacgagttcataaattttgacccagaagttgaaagacaacagactgaattacgtcataagcgtacaggcggtaagcactgaggatccataaaaaacacgctttttcagttcgagtttatcattatcaatactgccatttcaaagaatacgtaaataattaatagtagtgattttcctaactttatttagtcaaaaaattagccttttaattctgctgtaacccgtacatgcccaaaatagggggcgggttacacagaatatataacatcgtaggtgtctgggtgaacagtttattcctggcatccactaaatataatggagcccgctttttaagctggcatccagaaaaaaaaagaatcccagcaccaaaatattgttttcttcaccaaccatcagttcataggtccattctcttagcgcaactacagagaacaggggcacaaacaggcaaaaaacgggcacaacctcaatggagtgatgcaacctgcctggagtaaatgatgacacaaggcaattgacccacgcatgtatctatctcattttcttacaccttctattaccttctgctctctctgatttggaaaaagctgaaaaaaaaggttgaaaccagttccctgaaattattcccctacttgactaataagtatataaagacggtaggtattgattgtaattctgtaaatctatttcttaaacttcttaaattctacttttatagttagtcttttttttagttttaaaacaccaagaacttagtttcgaataaacacacataaacaaacaaaaagcttatggcacctgttacaattgaaaagttcgtaaatcaagaagaacgacaccttgtttccaaccgatcagcaacaattccgtttggtgaatacatatttaaaagattgttgtccatcgatacgaaatcagttttcggtgttcctggtgacttcaacttatctctattagaatatctctattcacctagtgttgaatcagctggcctaagatgggtcggcacgtgtaatgaactgaacgccgcttatgcggccgacggatattcccgttactctaataagattggctgtttaataaccacgtatggcgttggtgaattaagcgccttgaacggtatagccggttcgttcgctgaaaatgtcaaagttttgcacattgttggtgtggccaagtccatagattcgcgttcaagtaactttagtgatcggaacctacatcatttggtcccacagctacatgattcaaattttaaagggccaaatcataaagtatatcatgatatggtaaaagatagagtcgcttgctcggtagcctacttggaggatattgaaactgcatgtgaccaagtcgataatgttatccgcgatatttacaagtattctaaacctggttatatttttgttcctgcagattttgcggatatgtctgttacatgtgataatttggttaatgttccacgtatatctcaacaagattgtatagtatacccttctgaaaaccaattgtctgacataatcaacaagattactagttggatatattccagtaaaacacctgcgatccttggagacgtactgactgataggtatggtgtgagtaactttttgaacaagcttatctgcaaaactgggatttggaatttttccactgttatgggaaaatctgtaattgatgagtcaaacccaacttatatgggtcaatataatggtaaagaaggtttaaaacaagtctatgaacattttgaactgtgcgacttggtcttgcattttggagtcgacatcaatgaaattaataatgggcattatacttttacttataaaccaaatgctaaaatcattcaatttcatccgaattatattcgccttgtggacactaggcagggcaatgagcaaatgttcaaaggaatcaattttgcccctattttaaaagaactatacaagcgcattgacgtttctaaactttctttgcaatatgattcaaatgtaactcaatatacgaacgaaacaatgcggttagaagatcctaccaatggacaatcaagcattattacacaagttcacttacaaaagacgatgcctaaatttttgaaccctggtgatgttgtcgtttgtgaaacaggctcttttcaattctctgttcgtgatttcgcgtttccttcgcaattaaaatatatatcgcaaggatttttcctttccattggcatggcccttcctgccgccctaggtgttggaattgccatgcaagaccactcaaacgctcacatcaatggtggcaacgtaaaagaggactataagccaagattaattttgtttgaaggtgacggtgcagcacagatgacaatccaagaactgagcaccattctgaagtgcaatattccactagaagttatcatttggaacaataacggctacactattgaaagagccatcatgggccctaccaggtcgtataacgacgttatgtcttggaaatggaccaaactatttgaagcattcggagacttcgacggaaagtatactaatagcactctcattcaatgtccctctaaattagcactgaaattggaggagcttaagaattcaaacaaaagaagcgggatagaacttttagaagtcaaattaggcgaattggatttccccgaacagctaaagtgcatggttgaagcagcggcacttaaaagaaataaaaaagtgacacatggttataatgtgcagcgatacaatcagttacgtaaaaattttggattttatagagcatattcttcactaagaggttgtaagagcgttttcagacgtatataggctaggtcatgtaattagttatgtcacgcttacattcacgccctccccccacatccgctctaaccgaaaaggaaggagttagacaacctgaagtctaggtccctatttatttttttatagttatgttagtattaagaacgttatttatatttcaaatttttcttttttttctgtacagacgcgtgtacgcatgtaacattatactgaaaaccttgcttgagaaggttttgggacgctcgaaggctttaatttgcgggtgtacaatatggacttcctcttttctggcaaccaaacccatacatcgggattcctataataccttcgttggtctccctaacatgtaggtggcggaggggagatatacaatagaacagataccagacaagacataatgggctaaacaagactacaccaattacactgcctcattgatggtggtacataacgaactaatactgtagccctagacttgatagccatcatcatatcgaagtttcactaccctttttccatttgccatctattgaagtaataataggcgcatgcaacttcttttctttttttttcttttctctctcccccgttgttgtctcaccatatccgcaatgacaaaaaaatgatggaagacactaaaggaaaaaattaacgacaaagacagcaccaacagatgtcgttgttccagagctgatgaggggtatctcgaagcacacgaaactttttccttccttcattcacgcacactactctctaatgagcaacggtatacggccttccttccagttacttgaatttgaaataaaaaaaagtttgctgtcttgctatcaagtataaatagacctgcaattattaatcttttgtttcctcgtcattgttctcgttccctttcttccttgtttctttttctgcacaatatttcaagctataccaagcatacaatcaactatctcatatacacatatgttgagaacgtcaacattgttcaccaggcgtgtccaaccaagcctattttctagaaacattcttagattgcaatccacagctgcattatatccagagaaattccaaggcattggtatctccaacgcaaaggattggaagcatcctaaacttgttagtttcgaccccaaacctttcggtgaccatgacgttgatgttgagattgaagcatgtggaatatgtgggagcgattttcatattgcagtaggcaattggggccctgttccggaaaatcaaattttgggtcacgaaattattggtagggtagtgaaggtgggttcaaaatgtcacacgggtgttaagattggtgatagggttggtgtaggtgcccaagcattggcttgtttcgaatgcgaaagatgcaaaagtgataacgaacaatactgtaccaacgatcatgttctaacaatgtggactccttacaaagatggatacatatctcaaggtggatttgcatcacatgttagattgcatgagcattttgcaattcaaattccggagaatatcccatcacctttggctgcaccattattgtgtgggggaataacagtgtttagtcctttattgagaaacggttgtggacctggtaagcgtgtggggattgttggcataggtggtattggtcacatggggatattactagctaaggccatgggagccgaagtttatgcgttcagtagaggacactccaagcgtgaagacagtatgaagttaggggcggaccattatattgccatgttggaggataaaggctggaccgaacaatattcaaatgctcttgatctgttagttgtgtgtagttcttctcttagtaaagttaattttgactcgattgtgaaaataatgaagattggcggctccattgtttccattgctgctccagaagttaacgagaagctggtactaaaaccactgggtctgatgggggtatctatctcatcttctgctatcggttcaagaaaagaaatagaacagctattaaagctagtcagcgagaaaaatgtgaagatttgggtagagaagctacccataagcgaggagggtgtatctcacgcatttacgagaatggaatccggagatgttaagtacaggtttacacttgtagactatgacaagaaattccataagtgagcggccgcataacaatactgacagtactaaataattgcctacttggcttcacatacgttgcatacgtcgatatagataataatgataatgacagcaggattatcgtaatacgtaatagttgaaaatctcaaaaatgtgtgggtcattacgtaaataatgataggaatgggattcttctatttttcctttttccattctagcagccgtcgggaaaacgtggcatcctctctttcgggctcaattggagtcacgctgccgtgagcatcctctctttccatatctaacaactgagcacgtaaccaatggaaaagcatgagcttagcgttgctccaaaaaagtattggatggttaataccatttgtctgttctcttctgactttgactcctcaaaaaaaaaaaatctacaatcaacagatcgcttcaattacgccctcacaaaaacttttttccttcttcttcgcccacgttaaattttatccctcatgttgtctaacggatttctgcacttgatttattataaaaagacaaagacataatacttctctatcaatttcagttattgttcttccttgcgttattcttctgttcttctttttcttttgtcatatataaccataaccaagtaatacatattcaaactcgagatgtccaaagctacttataaagaaagggctgcaacccatccatccccagtggcagctaaactgtttaacataatgcacgaaaaacaaactaacttatgcgcatcattagatgtaagaactactaaagagctactggagttggttgaggctttaggtccaaaaatttgtttgttgaagacacatgttgacatattaacagatttttctatggagggtaccgttaagcctctgaaagcgttaagcgcgaaatataactttcttttatttgaagaccgtaagtttgctgatattggaaatactgttaagttgcaatatagcgcaggagtttatagaattgccgaatgggctgacattacgaatgcccacggtgttgtaggtcctggcattgtgtctggattgaaacaagcggcagaggaagtgactaaggaaccaagaggtttactaatgctggcggaattatcttgcaaaggctctctagccaccggtgaatatacaaaaggtactgtggatattgcaaagtctgataaggacttcgtaatcggttttattgcacaaagagatatgggaggtcgtgagaattcaaaatgaagtgaagttcctatactttctagagaataggaacttctatagtgagtcgaataagggcgacacaaaatttattctaaatgcataataaatactgataacatcttatagtttgtattatattttgtattatcgttgacatgtataattttgatatcaaaaactgattttccctttattattttcgagatttattttcttaattctctttaacaaactagaaatattgtatatacaaaaaatcataaataatagatgaatagtttaattataggtgttcatcaatcgaaaaagcaacgtatcttatttaaagtgcgttgcttttttctcatttataaggttaaataattctcatatatcaagcaaagtgacaggcgcccttaaatattctgacaaatgctctttccctaaactccccccataaaaaaacccgccgaagcgggtttttacgttatttgcggattaacgattactcgttatcagaaccgcccagggggcccgagcttaagactggccgtcgttttacaacacagaaagagtttgtagaaacgcaaaaaggccatccgtcaggggccttctgcttagtttgatgcctggcagttccctactctcgccttccgcttcctcgctcactgactcgctgcgctcggtcgttcggctgcggcgagcggtatcagctcactcaaaggcggtaatacggttatccacagaatcaggggataacgcaggaaagaacatgtgagcaaaaggccagcaaaaggccaggaaccgtaaaaaggccgcgttgctggcgtttttccataggctccgcccccctgacgagcatcacaaaaatcgacgctcaagtcagaggtggcgaaacccgacaggactataaagataccaggcgtttccccctggaagctccctcgtgcgctctcctgttccgaccctgccgcttaccggatacctgtccgcctttctcccttcgggaagcgtggcgctttctcatagctcacgctgtaggtatctcagttcggtgtaggtcgttcgctccaagctgggctgtgtgcacgaaccccccgttcagcccgaccgctgcgccttatccggtaactatcgtcttgagtccaacccggtaagacacgacttatcgccactggcagcagccactggtaacaggattagcagagcgaggtatgtaggcggtgctacagagttcttgaagtggtgggctaactacggctacactagaagaacagtatttggtatctgcgctctgctgaagccagttaccttcggaaaaagagttggtagctcttgatccggcaaacaaaccaccgctggtagcggtggtttttttgtttgcaagcagcagattacgcgcagaaaaaaaggatctcaagaagatcctttgatcttttctacggggtctgacgctcagtggaacgacgcgcgcgtaactcacgttaagggattttggtcatgagcttgcgccgtcccgtcaagtcagcgtaatgctctgcttt

SEQ ID NO: 39 - DNA, 11047 bp, Artificial Sequence
  Plasmid pGV7002
tagaaaaactcatcgagcatcaaatgaaactgcaatttattcatatcaggattatcaataccatatttttgaaaaagccgtttctgtaatgaaggagaaaactcaccgaggcagttccataggatggcaagatcctggtatcggtctgcgattccgactcgtccaacatcaatacaacctattaatttcccctcgtcaaaaataaggttatcaagtgagaaatcaccatgagtgacgactgaatccggtgagaatggcaaaagtttatgcatttctttccagacttgttcaacaggccagccattacgctcgtcatcaaaatcactcgcatcaaccaaaccgttattcattcgtgattgcgcctgagcgaggcgaaatacgcgatcgctgttaaaaggacaattacaaacaggaatcgagtgcaaccggcgcaggaacactgccagcgcatcaacaatattttcacctgaatcaggatattcttctaatacctggaacgctgtttttccggggatcgcagtggtgagtaaccatgcatcatcaggagtacggataaaatgcttgatggtcggaagtggcataaattccgtcagccagtttagtctgaccatctcatctgtaacatcattggcaacgctacctttgccatgtttcagaaacaactctggcgcatcgggcttcccatacaagcgatagattgtcgcacctgattgcccgacattatcgcgagcccatttatacccatataaatcagcatccatgttggaatttaatcgcggcctcgacgtttcccgttgaatatggctcatattcttcctttttcaatattattgaagcatttatcagggttattgtctcatgagcggatacatatttgaatgtatttagaaaaataaacaaataggggtcagtgttacaaccaattaaccaattctgaacattatcgcgagcccatttatacctgaatatggctcataacaccccttgtttgcctggcggcagtagcgcggtggtcccacctgaccccatgccgaactcagaagtgaaacgccgtagcgccgatggtagtgtggggactccccatgcgagagtagggaactgccaggcatcaaataaaacgaaaggctcagtcgaaagactgggcctttcgcccgggctaattagggggtgtcgcccttattcgactctatagtgaagttcctattctctagaaagtataggaacttctgaagtggggaagcaaggcagaaactaacttcttcttcatgtaataaacacaccccgcgtttatttacctatctctaaacttcaacaccttatatcataactaatatttcttgagataagcacactgcacccataccttccttaaaaacgtagcttccagtttttggtggttccggcttccttcccgattccgcccgctaaacgcatatttttgttgcctggtggcatttgcaaaatgcataacctatgcatttaaaagattatgtatgctcttctgacttttcgtgtgatgaggctcgtggaaaaaatgaataatttatgaatttgagaacaattttgtgttgttacggtattttactatggaataatcaatcaattgaggattttatgcaaatatcgtttgaatatttttccgaccctttgagtacttttcttcataattgcataatattgtccgctgcccctttttctgttagacggtgtcttgatctacttgctatcgttcaacaccaccttattttctaactattttttttttagctcatttgaatcagcttatggtgatggcacatttttgcataaacctagctgtcctcgttgaacataggaaaaaaaaatatataaacaaggctctttcactctccttgcaatcagatttgggtttgttccctttattttcatatttcttgtcatattcctttctcaattattattttctactcataacctcacgcaaaataacacagtcaaatcaatcaaagtcgagatgctttcactacgtcaatctataagatttttcaagccagccacaagaactttgtgtagctctagatatctgcttcagcaaaaacccgtggtgatgttgactaaagctacaaaagagcagaaatcattggtgaaaaataggggtgcagaacttgttgtggactgtttggtagaacagggcgtaacacatgtttttggtatcccaggtgcaaaaatcgacgccgtgtttgatgcattacaagacaagggtccagaaattattgttgctagacatgagcaaaatgccgcatttatggcgcaagctgtaggtaggcttacaggtaaacctggtgttgtcctagttacgtctggcccaggagcctccaatttagcaactggtctattgacagctaatactgagggagatcctgtagttgcgttagccggtaatgtaattagagctgataggcttaagagaactcaccagtctctagacaacgctgctttattccaaccgatcaccaagtactcagtagaggtacaagacgtaaagaatatacctgaagctgtgacaaacgcatttcgtatagcttctgctggtcaggctggtgccgcgtttgtttcttttcctcaagacgttgtcaatgaagtgaccaatactaaaaacgttagagcggttgcagcccctaaactaggtccagccgcagacgacgcaattagcgctgcaattgctaaaattcagacggcgaaactaccagtagtccttgtcggtatgaagggcggaagaccagaagcaataaaagctgttcgtaagttattgaagaaagtccaattacctttcgttgagacttaccaagcagcaggtactttatctagagatttagaggatcagtattttggaaggataggtctatttagaaaccaaccaggagatttactattagaacaagctgatgttgtacttactatcggttatgatcctatagagtatgacccaaagttttggaacataaatggggatagaacaattatacatctagacgagataatcgccgacatcgatcacgcttatcaaccagatttagaactaatcggagatatcccgtcaacaatcaatcatattgaacatgatgctgtaaaggttgagttcgctgaacgtgagcagaaaatcttatctgatctaaagcaatatatgcatgagggtgaacaagttccagcagactggaaatctgaccgtgcacatcctttggaaatcgttaaggaactaagaaatgcggtcgatgatcatgtgactgttacatgtgatatcggttcacatgcaatttggatgtcacgttattttaggagctacgaaccattaactttaatgatatctaacgggatgcaaactctgggggttgcacttccttgggctattggcgctagtttagttaagcccggtgagaaggtggtatcggtatcaggtgatggtggctttctgttttcggctatggaattagaaactgcagtccgtttaaaagctcccattgtgcatattgtctggaatgattctacttacgacatggttgcttttcaacagttgaagaaatacaatagaacttcggctgtagactttggtaacatcgatattgtgaaatatgctgagtcttttggcgcaacaggcctgagggtggaaagtccagatcagttagctgatgtgttgagacaagggatgaatgccgagggaccggtaatcatagatgtgccagttgactactcagacaatattaatttggcttctgataaacttcctaaagagtttggcgagctaatgaagaccaaagccttataaggatccataaaaaacacgctttttcagttcgagtttatcattatcaatactgccatttcaaagaatacgtaaataattaatagtagtgattttcctaactttatttagtcaaaaaattagccttttaattctgctgtaacccgtacatgcccaaaatagggggcgggttacacagaatatataacatcgtaggtgtctgggtgaacagtttattcctggcatccactaaatataatggagcccgctttttaagctggcatccagaaaaaaaaagaatcccagcaccaaaatattgttttcttcaccaaccatcagttcataggtccattctcttagcgcaactacagagaacaggggcacaaacaggcaaaaaacgggcacaacctcaatggagtgatgcaacctgcctggagtaaatgatgacacaaggcaattgacccacgcatgtatctatctcattttcttacaccttctattaccttctgctctctctgatttggaaaaagctgaaaaaaaaggttgaaaccagttccctgaaattattcccctacttgactaataagtatataaagacggtaggtattgattgtaattctgtaaatctatttcttaaacttcttaaattctacttttatagttagtcttttttttagttttaaaacaccaagaacttagtttcgaataaacacacataaacaaacaaaaagcttatgtatactgttggagattatttgttagatagattgcatgaactaggcattgaagaaattttcggagttcccggggattacaatctgcaatttctagaccagattatttcacataaagacatgaaatgggtcggaaatgcaaatgagttaaatgcatcttacatggccgatggttatgccagaaccaaaaaggcggctgctttcttgactaccttcggggtgggtgaattatcggcagttaatggcttggctggatcatacgcagaaaacttgcctgtcgttgaaatcgttggctcgccaacatcaaaagttcaaaatgaaggaaaattcgtccaccacactttggcagatggtgacttcaagcacttcatgaaaatgcatgaacctgtaacggctgccagaactctactaactgctgagaatgcaactgtagagattgatcgtgtcttgagcgctcttttaaaggaaagaaagccagtctatattaacctgccagtagacgtcgcagcggccaaagcagagaagcctagcttaccacttaaaaaggaaaatagtacctcaaacacttcagatcaagagattcttaacaagatccaggaatctttgaaaaacgctaaaaagcccattgttataactggccatgagatcatatcatttggtttggagaaaacagtgacccagttcattagtaagacgaaactgccaataaccactctaaatttcggtaagtcctccgttgatgaagcgttgcctagcttcttgggtatttacaacggcaccttgtcagaacccaatctgaaagaatttgttgaatctgcagactttatattgatgttgggagtaaagttgactgacagctctactggtgcttttacacaccatctgaatgaaaacaagatgatatctcttaatatcgatgaaggtaagatattcaatgaaagaatacagaacttcgacttcgagagtctaatttcttccttactggacttaagtgaaatcgagtataaaggtaagtacattgacaaaaagcaggaagattttgttccgagcaacgcgctacttagtcaagatagattatggcaagctgttgaaaatctgacacaatccaatgagacaattgttgccgaacaaggtacctccttttttggcgcttcttccatcttcctaaagtccaagtctcatttcatagggcagccattgtggggtagcatcggttacacctttcctgctgctctagggtcccaaattgctgataaagaaagtagacatttgttgtttataggagacggatctttacaattgacagttcaagagttaggtttagccatcagagagaagattaatcctatctgcttcataataaacaacgatggctatacagttgagagggaaattcatggacctaatcaatcttataatgatataccaatgtggaattatagcaagttacctgaatcttttggggctaccgaggatcgtgttgtttctaagattgtaagaaccgaaaatgaatttgtttctgttatgaaggaagcacaagcggaccctaacaggatgtactggattgagttaattcttgctaaggagggtgcgccaaaggttctaaagaagatgggtaagttgttcgccgaacaaaacaaatccgtgacacatggttataatgtgcagcgatacaatcagttacgtaaaaattttggattttatagagcatattcttcactaagaggttgtaagagcgttttcagacgtatataggctaggtcatgtaattagttatgtcacgcttacattcacgccctccccccacatccgctctaaccgaaaaggaaggagttagacaacctgaagtctaggtccctatttatttttttatagttatgttagtattaagaacgttatttatatttcaaatttttcttttttttctgtacagacgcgtgtacgcatgtaacattatactgaaaaccttgcttgagaaggttttgggacgctcgaaggctttaatttgcgggtgtacaatatggacttcctcttttctggcaaccaaacccatacatcgggattcctataataccttcgttggtctccctaacatgtaggtggcggaggggagatatacaatagaacagataccagacaagacataatgggctaaacaagactacaccaattacactgcctcattgatggtggtacataacgaactaatactgtagccctagacttgatagccatcatcatatcgaagtttcactaccctttttccatttgccatctattgaagtaataataggcgcatgcaacttcttttctttttttttcttttctctctcccccgttgttgtctcaccatatccgcaatgacaaaaaaatgatggaagacactaaaggaaaaaattaacgacaaagacagcaccaacagatgtcgttgttccagagctgatgaggggtatctcgaagcacacgaaactttttccttccttcattcacgcacactactctctaatgagcaacggtatacggccttccttccagttacttgaatttgaaataaaaaaaagtttgctgtcttgctatcaagtataaatagacctgcaattattaatcttttgtttcctcgtcattgttctcgttccctttcttccttgtttctttttctgcacaatatttcaagctataccaagcatacaatcaactatctcatatacacatatgttatatccagagaaattccaaggcattggtatctccaacgcaaaggattggaagcatcctaaacttgttagtttcgaccccaaacctttcggtgaccatgacgttgatgttgagattgaagcatgtggaatatgtgggagcgattttcatattgcagtaggcaattggggccctgttccggaaaatcaaattttgggtcacgaaattattggtagggtagtgaaggtgggttcaaaatgtcacacgggtgttaagattggtgatagggttggtgtaggtgcccaagcattggcttgtttcgaatgcgaaagatgcaaaagtgataacgaacaatactgtaccaacgatcatgttctaacaatgtggactccttacaaagatggatacatatctcaaggtggatttgcatcacatgttagattgcatgagcattttgcaattcaaattccggagaatatcccatcacctttggctgcaccattattgtgtgggggaataacagtgtttagtcctttattgagaaacggttgtggacctggtaagcgtgtggggattgttggcataggtggtattggtcacatggggatattactagctaaggccatgggagccgaagtttatgcgttcagtagaggacactccaagcgtgaagacagtatgaagttaggggcggaccattatattgccatgttggaggataaaggctggaccgaacaatattcaaatgctcttgatctgttagttgtgtgtagttcttctcttagtaaagttaattttgactcgattgtgaaaataatgaagattggcggctccattgtttccattgctgctccagaagttaacgagaagctggtactaaaaccactgggtctgatgggggtatctatctcatcttctgctatcggttcaagaaaagaaatagaacagctattaaagctagtcagcgagaaaaatgtgaagatttgggtagagaagctacccataagcgaggagggtgtatctcacgcatttacgagaatggaatccggagatgttaagtacaggtttacacttgtagactatgacaagaaattccataagtgagcggccgcataacaatactgacagtactaaataattgcctacttggcttcacatacgttgcatacgtcgatatagataataatgataatgacagcaggattatcgtaatacgtaatagttgaaaatctcaaaaatgtgtgggtcattacgtaaataatgataggaatgggattcttctatttttcctttttccattctagcagccgtcgggaaaacgtggcatcctctctttcgggctcaattggagtcacgctgccgtgagcatcctctctttccatatctaacaactgagcacgtaaccaatggaaaagcatgagcttagcgttgctccaaaaaagtattggatggttaataccatttgtctgttctcttctgactttgactcctcaaaaaaaaaaaatctacaatcaacagatcgcttcaattacgccctcacaaaaacttttttccttcttcttcgcccacgttaaattttatccctcatgttgtctaacggatttctgcacttgatttattataaaaagacaaagacataatacttctctatcaatttcagttattgttcttccttgcgttattcttctgttcttctttttcttttgtcatatataaccataaccaagtaatacatattcaaactcgagatgtccaaagctacttataaagaaagggctgcaacccatccatccccagtggcagctaaactgtttaacataatgcacgaaaaacaaactaacttatgcgcatcattagatgtaagaactactaaagagctactggagttggttgaggctttaggtccaaaaatttgtttgttgaagacacatgttgacatattaacagatttttctatggagggtaccgttaagcctctgaaagcgttaagcgcgaaatataactttcttttatttgaagaccgtaagtttgctgatattggaaatactgttaagttgcaatatagcgcaggagtttatagaattgccgaatgggctgacattacgaatgcccacggtgttgtaggtcctggcattgtgtctggattgaaacaagcggcagaggaagtgactaaggaaccaagaggtttactaatgctggcggaattatcttgcaaaggctctctagccaccggtgaatatacaaaaggtactgtggatattgcaaagtctgataaggacttcgtaatcggttttattgcacaaagagatatgggaggtcgtgagaattcaaaatgaagtgaagttcctatactttctagagaataggaacttctatagtgagtcgaataagggcgacacaaaatttattctaaatgcataataaatactgataacatcttatagtttgtattatattttgtattatcgttgacatgtataattttgatatcaaaaactgattttccctttattattttcgagatttattttcttaattctctttaacaaactagaaatattgtatatacaaaaaatcataaataatagatgaatagtttaattataggtgttcatcaatcgaaaaagcaacgtatcttatttaaagtgcgttgcttttttctcatttataaggttaaataattctcatatatcaagcaaagtgacaggcgcccttaaatattctgacaaatgctctttccctaaactccccccataaaaaaacccgccgaagcgggtttttacgttatttgcggattaacgattactcgttatcagaaccgcccagggggcccgagcttaagactggccgtcgttttacaacacagaaagagtttgtagaaacgcaaaaaggccatccgtcaggggccttctgcttagtttgatgcctggcagttccctactctcgccttccgcttcctcgctcactgactcgctgcgctcggtcgttcggctgcggcgagcggtatcagctcactcaaaggcggtaatacggttatccacagaatcaggggataacgcaggaaagaacatgtgagcaaaaggccagcaaaaggccaggaaccgtaaaaaggccgcgttgctggcgtttttccataggctccgcccccctgacgagcatcacaaaaatcgacgctcaagtcagaggtggcgaaacccgacaggactataaagataccaggcgtttccccctggaagctccctcgtgcgctctcctgttccgaccctgccgcttaccggatacctgtccgcctttctcccttcgggaagcgtggcgctttctcatagctcacgctgtaggtatctcagttcggtgtaggtcgttcgctccaagctgggctgtgtgcacgaaccccccgttcagcccgaccgctgcgccttatccggtaactatcgtcttgagtccaacccggtaagacacgacttatcgccactggcagcagccactggtaacaggattagcagagcgaggtatgtaggcggtgctacagagttcttgaagtggtgggctaactacggctacactagaagaacagtatttggtatctgcgctctgctgaagccagttaccttcggaaaaagagttggtagctcttgatccggcaaacaaaccaccgctggtagcggtggtttttttgtttgcaagcagcagattacgcgcagaaaaaaaggatctcaagaagatcctttgatcttttctacggggtctgacgctcagtggaacgacgcgcgcgtaactcacgttaagggattttggtcatgagcttgcgccgtcccgtcaagtcagcgtaatgctctgcttt

SEQ ID NO: 40 - DNA, 11290 bp, Artificial Sequence
  Plasmid pGV7003
tagaaaaactcatcgagcatcaaatgaaactgcaatttattcatatcaggattatcaataccatatttttgaaaaagccgtttctgtaatgaaggagaaaactcaccgaggcagttccataggatggcaagatcctggtatcggtctgcgattccgactcgtccaacatcaatacaacctattaatttcccctcgtcaaaaataaggttatcaagtgagaaatcaccatgagtgacgactgaatccggtgagaatggcaaaagtttatgcatttctttccagacttgttcaacaggccagccattacgctcgtcatcaaaatcactcgcatcaaccaaaccgttattcattcgtgattgcgcctgagcgaggcgaaatacgcgatcgctgttaaaaggacaattacaaacaggaatcgagtgcaaccggcgcaggaacactgccagcgcatcaacaatattttcacctgaatcaggatattcttctaatacctggaacgctgtttttccggggatcgcagtggtgagtaaccatgcatcatcaggagtacggataaaatgcttgatggtcggaagtggcataaattccgtcagccagtttagtctgaccatctcatctgtaacatcattggcaacgctacctttgccatgtttcagaaacaactctggcgcatcgggcttcccatacaagcgatagattgtcgcacctgattgcccgacattatcgcgagcccatttatacccatataaatcagcatccatgttggaatttaatcgcggcctcgacgtttcccgttgaatatggctcatattcttcctttttcaatattattgaagcatttatcagggttattgtctcatgagcggatacatatttgaatgtatttagaaaaataaacaaataggggtcagtgttacaaccaattaaccaattctgaacattatcgcgagcccatttatacctgaatatggctcataacaccccttgtttgcctggcggcagtagcgcggtggtcccacctgaccccatgccgaactcagaagtgaaacgccgtagcgccgatggtagtgtggggactccccatgcgagagtagggaactgccaggcatcaaataaaacgaaaggctcagtcgaaagactgggcctttcgcccgggctaattagggggtgtcgcccttattcgactctatagtgaagttcctattctctagaaagtataggaacttctgaagtggggaagcaaggcagaaactaacttcttcttcatgtaataaacacaccccgcgtttatttacctatctctaaacttcaacaccttatatcataactaatatttcttgagataagcacactgcacccataccttccttaaaaacgtagcttccagtttttggtggttccggcttccttcccgattccgcccgctaaacgcatatttttgttgcctggtggcatttgcaaaatgcataacctatgcatttaaaagattatgtatgctcttctgacttttcgtgtgatgaggctcgtggaaaaaatgaataatttatgaatttgagaacaattttgtgttgttacggtattttactatggaataatcaatcaattgaggattttatgcaaatatcgtttgaatatttttccgaccctttgagtacttttcttcataattgcataatattgtccgctgcccctttttctgttagacggtgtcttgatctacttgctatcgttcaacaccaccttattttctaactattttttttttagctcatttgaatcagcttatggtgatggcacatttttgcataaacctagctgtcctcgttgaacataggaaaaaaaaatatataaacaaggctctttcactctccttgcaatcagatttgggtttgttccctttattttcatatttcttgtcatattcctttctcaattattattttctactcataacctcacgcaaaataacacagtcaaatcaatcaaagtcgagatgctttcactacgtcaatctataagatttttcaagccagccacaagaactttgtgtagctctagatatctgcttatgttgactaaagctacaaaagagcagaaatcattggtgaaaaataggggtgcagaacttgttgtggactgtttggtagaacagggcgtaacacatgtttttggtatcccaggtgcaaaaatcgacgccgtgtttgatgcattacaagacaagggtccagaaattattgttgctagacatgagcaaaatgccgcatttatggcgcaagctgtaggtaggcttacaggtaaacctggtgttgtcctagttacgtctggcccaggagcctccaatttagcaactggtctattgacagctaatactgagggagatcctgtagttgcgttagccggtaatgtaattagagctgataggcttaagagaactcaccagtctctagacaacgctgctttattccaaccgatcaccaagtactcagtagaggtacaagacgtaaagaatatacctgaagctgtgacaaacgcatttcgtatagcttctgctggtcaggctggtgccgcgtttgtttcttttcctcaagacgttgtcaatgaagtgaccaatactaaaaacgttagagcggttgcagcccctaaactaggtccagccgcagacgacgcaattagcgctgcaattgctaaaattcagacggcgaaactaccagtagtccttgtcggtatgaagggcggaagaccagaagcaataaaagctgttcgtaagttattgaagaaagtccaattacctttcgttgagacttaccaagcagcaggtactttatctagagatttagaggatcagtattttggaaggataggtctatttagaaaccaaccaggagatttactattagaacaagctgatgttgtacttactatcggttatgatcctatagagtatgacccaaagttttggaacataaatggggatagaacaattatacatctagacgagataatcgccgacatcgatcacgcttatcaaccagatttagaactaatcggagatatcccgtcaacaatcaatcatattgaacatgatgctgtaaaggttgagttcgctgaacgtgagcagaaaatcttatctgatctaaagcaatatatgcatgagggtgaacaagttccagcagactggaaatctgaccgtgcacatcctttggaaatcgttaaggaactaagaaatgcggtcgatgatcatgtgactgttacatgtgatatcggttcacatgcaatttggatgtcacgttattttaggagctacgaaccattaactttaatgatatctaacgggatgcaaactctgggggttgcacttccttgggctattggcgctagtttagttaagcccggtgagaaggtggtatcggtatcaggtgatggtggctttctgttttcggctatggaattagaaactgcagtccgtttaaaagctcccattgtgcatattgtctggaatgattctacttacgacatggttgcttttcaacagttgaagaaatacaatagaacttcggctgtagactttggtaacatcgatattgtgaaatatgctgagtcttttggcgcaacaggcctgagggtggaaagtccagatcagttagctgatgtgttgagacaagggatgaatgccgagggaccggtaatcatagatgtgccagttgactactcagacaatattaatttggcttctgataaacttcctaaagagtttggcgagctaatgaagaccaaagccttataaggatccataaaaaacacgctttttcagttcgagtttatcattatcaatactgccatttcaaagaatacgtaaataattaatagtagtgattttcctaactttatttagtcaaaaaattagccttttaattctgctgtaacccgtacatgcccaaaatagggggcgggttacacagaatatataacatcgtaggtgtctgggtgaacagtttattcctggcatccactaaatataatggagcccgctttttaagctggcatccagaaaaaaaaagaatcccagcaccaaaatattgttttcttcaccaaccatcagttcataggtccattctcttagcgcaactacagagaacaggggcacaaacaggcaaaaaacgggcacaacctcaatggagtgatgcaacctgcctggagtaaatgatgacacaaggcaattgacccacgcatgtatctatctcattttcttacaccttctattaccttctgctctctctgatttggaaaaagctgaaaaaaaaggttgaaaccagttccctgaaattattcccctacttgactaataagtatataaagacggtaggtattgattgtaattctgtaaatctatttcttaaacttcttaaattctacttttatagttagtcttttttttagttttaaaacaccaagaacttagtttcgaataaacacacataaacaaacaaaaagcttatggcacctgttacaattgaaaagttcgtaaatcaagaagaacgacaccttgtttccaaccgatcagcaacaattccgtttggtgaatacatatttaaaagattgttgtccatcgatacgaaatcagttttcggtgttcctggtgacttcaacttatctctattagaatatctctattcacctagtgttgaatcagctggcctaagatgggtcggcacgtgtaatgaactgaacgccgcttatgcggccgacggatattcccgttactctaataagattggctgtttaataaccacgtatggcgttggtgaattaagcgccttgaacggtatagccggttcgttcgctgaaaatgtcaaagttttgcacattgttggtgtggccaagtccatagattcgcgttcaagtaactttagtgatcggaacctacatcatttggtcccacagctacatgattcaaattttaaagggccaaatcataaagtatatcatgatatggtaaaagatagagtcgcttgctcggtagcctacttggaggatattgaaactgcatgtgaccaagtcgataatgttatccgcgatatttacaagtattctaaacctggttatatttttgttcctgcagattttgcggatatgtctgttacatgtgataatttggttaatgttccacgtatatctcaacaagattgtatagtatacccttctgaaaaccaattgtctgacataatcaacaagattactagttggatatattccagtaaaacacctgcgatccttggagacgtactgactgataggtatggtgtgagtaactttttgaacaagcttatctgcaaaactgggatttggaatttttccactgttatgggaaaatctgtaattgatgagtcaaacccaacttatatgggtcaatataatggtaaagaaggtttaaaacaagtctatgaacattttgaactgtgcgacttggtcttgcattttggagtcgacatcaatgaaattaataatgggcattatacttttacttataaaccaaatgctaaaatcattcaatttcatccgaattatattcgccttgtggacactaggcagggcaatgagcaaatgttcaaaggaatcaattttgcccctattttaaaagaactatacaagcgcattgacgtttctaaactttctttgcaatatgattcaaatgtaactcaatatacgaacgaaacaatgcggttagaagatcctaccaatggacaatcaagcattattacacaagttcacttacaaaagacgatgcctaaatttttgaaccctggtgatgttgtcgtttgtgaaacaggctcttttcaattctctgttcgtgatttcgcgtttccttcgcaattaaaatatatatcgcaaggatttttcctttccattggcatggcccttcctgccgccctaggtgttggaattgccatgcaagaccactcaaacgctcacatcaatggtggcaacgtaaaagaggactataagccaagattaattttgtttgaaggtgacggtgcagcacagatgacaatccaagaactgagcaccattctgaagtgcaatattccactagaagttatcatttggaacaataacggctacactattgaaagagccatcatgggccctaccaggtcgtataacgacgttatgtcttggaaatggaccaaactatttgaagcattcggagacttcgacggaaagtatactaatagcactctcattcaatgtccctctaaattagcactgaaattggaggagcttaagaattcaaacaaaagaagcgggatagaacttttagaagtcaaattaggcgaattggatttccccgaacagctaaagtgcatggttgaagcagcggcacttaaaagaaataaaaaagtgacacatggttataatgtgcagcgatacaatcagttacgtaaaaattttggattttatagagcatattcttcactaagaggttgtaagagcgttttcagacgtatataggctaggtcatgtaattagttatgtcacgcttacattcacgccctccccccacatccgctctaaccgaaaaggaaggagttagacaacctgaagtctaggtccctatttatttttttatagttatgttagtattaagaacgttatttatatttcaaatttttcttttttttctgtacagacgcgtgtacgcatgtaacattatactgaaaaccttgcttgagaaggttttgggacgctcgaaggctttaatttgcgggtgtacaatatggacttcctcttttctggcaaccaaacccatacatcgggattcctataataccttcgttggtctccctaacatgtaggtggcggaggggagatatacaatagaacagataccagacaagacataatgggctaaacaagactacaccaattacactgcctcattgatggtggtacataacgaactaatactgtagccctagacttgatagccatcatcatatcgaagtttcactaccctttttccatttgccatctattgaagtaataataggcgcatgcaacttcttttctttttttttcttttctctctcccccgttgttgtctcaccatatccgcaatgacaaaaaaatgatggaagacactaaaggaaaaaattaacgacaaagacagcaccaacagatgtcgttgttccagagctgatgaggggtatctcgaagcacacgaaactttttccttccttcattcacgcacactactctctaatgagcaacggtatacggccttccttccagttacttgaatttgaaataaaaaaaagtttgctgtcttgctatcaagtataaatagacctgcaattattaatcttttgtttcctcgtcattgttctcgttccctttcttccttgtttctttttctgcacaatatttcaagctataccaagcatacaatcaactatctcatatacacatatgttatatccagagaaattccaaggcattggtatctccaacgcaaaggattggaagcatcctaaacttgttagtttcgaccccaaacctttcggtgaccatgacgttgatgttgagattgaagcatgtggaatatgtgggagcgattttcatattgcagtaggcaattggggccctgttccggaaaatcaaattttgggtcacgaaattattggtagggtagtgaaggtgggttcaaaatgtcacacgggtgttaagattggtgatagggttggtgtaggtgcccaagcattggcttgtttcgaatgcgaaagatgcaaaagtgataacgaacaatactgtaccaacgatcatgttctaacaatgtggactccttacaaagatggatacatatctcaaggtggatttgcatcacatgttagattgcatgagcattttgcaattcaaattccggagaatatcccatcacctttggctgcaccattattgtgtgggggaataacagtgtttagtcctttattgagaaacggttgtggacctggtaagcgtgtggggattgttggcataggtggtattggtcacatggggatattactagctaaggccatgggagccgaagtttatgcgttcagtagaggacactccaagcgtgaagacagtatgaagttaggggcggaccattatattgccatgttggaggataaaggctggaccgaacaatattcaaatgctcttgatctgttagttgtgtgtagttcttctcttagtaaagttaattttgactcgattgtgaaaataatgaagattggcggctccattgtttccattgctgctccagaagttaacgagaagctggtactaaaaccactgggtctgatgggggtatctatctcatcttctgctatcggttcaagaaaagaaatagaacagctattaaagctagtcagcgagaaaaatgtgaagatttgggtagagaagctacccataagcgaggagggtgtatctcacgcatttacgagaatggaatccggagatgttaagtacaggtttacacttgtagactatgacaagaaattccataagtgagcggccgcataacaatactgacagtactaaataattgcctacttggcttcacatacgttgcatacgtcgatatagataataatgataatgacagcaggattatcgtaatacgtaatagttgaaaatctcaaaaatgtgtgggtcattacgtaaataatgataggaatgggattcttctatttttcctttttccattctagcagccgtcgggaaaacgtggcatcctctctttcgggctcaattggagtcacgctgccgtgagcatcctctctttccatatctaacaactgagcacgtaaccaatggaaaagcatgagcttagcgttgctccaaaaaagtattggatggttaataccatttgtctgttctcttctgactttgactcctcaaaaaaaaaaaatctacaatcaacagatcgcttcaattacgccctcacaaaaacttttttccttcttcttcgcccacgttaaattttatccctcatgttgtctaacggatttctgcacttgatttattataaaaagacaaagacataatacttctctatcaatttcagttattgttcttccttgcgttattcttctgttcttctttttcttttgtcatatataaccataaccaagtaatacatattcaaactcgagatgtccaaagctacttataaagaaagggctgcaacccatccatccccagtggcagctaaactgtttaacataatgcacgaaaaacaaactaacttatgcgcatcattagatgtaagaactactaaagagctactggagttggttgaggctttaggtccaaaaatttgtttgttgaagacacatgttgacatattaacagatttttctatggagggtaccgttaagcctctgaaagcgttaagcgcgaaatataactttcttttatttgaagaccgtaagtttgctgatattggaaatactgttaagttgcaatatagcgcaggagtttatagaattgccgaatgggctgacattacgaatgcccacggtgttgtaggtcctggcattgtgtctggattgaaacaagcggcagaggaagtgactaaggaaccaagaggtttactaatgctggcggaattatcttgcaaaggctctctagccaccggtgaatatacaaaaggtactgtggatattgcaaagtctgataaggacttcgtaatcggttttattgcacaaagagatatgggaggtcgtgagaattcaaaatgaagtgaagttcctatactttctagagaataggaacttctatagtgagtcgaataagggcgacacaaaatttattctaaatgcataataaatactgataacatcttatagtttgtattatattttgtattatcgttgacatgtataattttgatatcaaaaactgattttccctttattattttcgagatttattttcttaattctctttaacaaactagaaatattgtatatacaaaaaatcataaataatagatgaatagtttaattataggtgttcatcaatcgaaaaagcaacgtatcttatttaaagtgcgttgcttttttctcatttataaggttaaataattctcatatatcaagcaaagtgacaggcgcccttaaatattctgacaaatgctctttccctaaactccccccataaaaaaacccgccgaagcgggtttttacgttatttgcggattaacgattactcgttatcagaaccgcccagggggcccgagcttaagactggccgtcgttttacaacacagaaagagtttgtagaaacgcaaaaaggccatccgtcaggggccttctgcttagtttgatgcctggcagttccctactctcgccttccgcttcctcgctcactgactcgctgcgctcggtcgttcggctgcggcgagcggtatcagctcactcaaaggcggtaatacggttatccacagaatcaggggataacgcaggaaagaacatgtgagcaaaaggccagcaaaaggccaggaaccgtaaaaaggccgcgttgctggcgtttttccataggctccgcccccctgacgagcatcacaaaaatcgacgctcaagtcagaggtggcgaaacccgacaggactataaagataccaggcgtttccccctggaagctccctcgtgcgctctcctgttccgaccctgccgcttaccggatacctgtccgcctttctcccttcgggaagcgtggcgctttctcatagctcacgctgtaggtatctcagttcggtgtaggtcgttcgctccaagctgggctgtgtgcacgaaccccccgttcagcccgaccgctgcgccttatccggtaactatcgtcttgagtccaacccggtaagacacgacttatcgccactggcagcagccactggtaacaggattagcagagcgaggtatgtaggcggtgctacagagttcttgaagtggtgggctaactacggctacactagaagaacagtatttggtatctgcgctctgctgaagccagttaccttcggaaaaagagttggtagctcttgatccggcaaacaaaccaccgctggtagcggtggtttttttgtttgcaagcagcagattacgcgcagaaaaaaaggatctcaagaagatcctttgatcttttctacggggtctgacgctcagtggaacgacgcgcgcgtaactcacgttaagggattttggtcatgagcttgcgccgtcccgtcaagtcagcgtaatgctctgcttt

SEQ ID NO: 41 - DNA, 11308 bp, Artificial Sequence
  Plasmid pGV7004
tagaaaaactcatcgagcatcaaatgaaactgcaatttattcatatcaggattatcaataccatatttttgaaaaagccgtttctgtaatgaaggagaaaactcaccgaggcagttccataggatggcaagatcctggtatcggtctgcgattccgactcgtccaacatcaatacaacctattaatttcccctcgtcaaaaataaggttatcaagtgagaaatcaccatgagtgacgactgaatccggtgagaatggcaaaagtttatgcatttctttccagacttgttcaacaggccagccattacgctcgtcatcaaaatcactcgcatcaaccaaaccgttattcattcgtgattgcgcctgagcgaggcgaaatacgcgatcgctgttaaaaggacaattacaaacaggaatcgagtgcaaccggcgcaggaacactgccagcgcatcaacaatattttcacctgaatcaggatattcttctaatacctggaacgctgtttttccggggatcgcagtggtgagtaaccatgcatcatcaggagtacggataaaatgcttgatggtcggaagtggcataaattccgtcagccagtttagtctgaccatctcatctgtaacatcattggcaacgctacctttgccatgtttcagaaacaactctggcgcatcgggcttcccatacaagcgatagattgtcgcacctgattgcccgacattatcgcgagcccatttatacccatataaatcagcatccatgttggaatttaatcgcggcctcgacgtttcccgttgaatatggctcatattcttcctttttcaatattattgaagcatttatcagggttattgtctcatgagcggatacatatttgaatgtatttagaaaaataaacaaataggggtcagtgttacaaccaattaaccaattctgaacattatcgcgagcccatttatacctgaatatggctcataacaccccttgtttgcctggcggcagtagcgcggtggtcccacctgaccccatgccgaactcagaagtgaaacgccgtagcgccgatggtagtgtggggactccccatgcgagagtagggaactgccaggcatcaaataaaacgaaaggctcagtcgaaagactgggcctttcgcccgggctaattagggggtgtcgcccttattcgactctatagtgaagttcctattctctagaaagtataggaacttctgaagtggggaagcaaggcagaaactaacttcttcttcatgtaataaacacaccccgcgtttatttacctatctctaaacttcaacaccttatatcataactaatatttcttgagataagcacactgcacccataccttccttaaaaacgtagcttccagtttttggtggttccggcttccttcccgattccgcccgctaaacgcatatttttgttgcctggtggcatttgcaaaatgcataacctatgcatttaaaagattatgtatgctcttctgacttttcgtgtgatgaggctcgtggaaaaaatgaataatttatgaatttgagaacaattttgtgttgttacggtattttactatggaataatcaatcaattgaggattttatgcaaatatcgtttgaatatttttccgaccctttgagtacttttcttcataattgcataatattgtccgctgcccctttttctgttagacggtgtcttgatctacttgctatcgttcaacaccaccttattttctaactattttttttttagctcatttgaatcagcttatggtgatggcacatttttgcataaacctagctgtcctcgttgaacataggaaaaaaaaatatataaacaaggctctttcactctccttgcaatcagatttgggtttgttccctttattttcatatttcttgtcatattcctttctcaattattattttctactcataacctcacgcaaaataacacagtcaaatcaatcaaagtcgagatgctttcactacgtcaatctataagatttttcaagccagccacaagaactttgtgtagctctagatatctgcttcagcaaaaacccgtggtgatgttgactaaagctacaaaagagcagaaatcattggtgaaaaataggggtgcagaacttgttgtggactgtttggtagaacagggcgtaacacatgtttttggtatcccaggtgcaaaaatcgacgccgtgtttgatgcattacaagacaagggtccagaaattattgttgctagacatgagcaaaatgccgcatttatggcgcaagctgtaggtaggcttacaggtaaacctggtgttgtcctagttacgtctggcccaggagcctccaatttagcaactggtctattgacagctaatactgagggagatcctgtagttgcgttagccggtaatgtaattagagctgataggcttaagagaactcaccagtctctagacaacgctgctttattccaaccgatcaccaagtactcagtagaggtacaagacgtaaagaatatacctgaagctgtgacaaacgcatttcgtatagcttctgctggtcaggctggtgccgcgtttgtttcttttcctcaagacgttgtcaatgaagtgaccaatactaaaaacgttagagcggttgcagcccctaaactaggtccagccgcagacgacgcaattagcgctgcaattgctaaaattcagacggcgaaactaccagtagtccttgtcggtatgaagggcggaagaccagaagcaataaaagctgttcgtaagttattgaagaaagtccaattacctttcgttgagacttaccaagcagcaggtactttatctagagatttagaggatcagtattttggaaggataggtctatttagaaaccaaccaggagatttactattagaacaagctgatgttgtacttactatcggttatgatcctatagagtatgacccaaagttttggaacataaatggggatagaacaattatacatctagacgagataatcgccgacatcgatcacgcttatcaaccagatttagaactaatcggagatatcccgtcaacaatcaatcatattgaacatgatgctgtaaaggttgagttcgctgaacgtgagcagaaaatcttatctgatctaaagcaatatatgcatgagggtgaacaagttccagcagactggaaatctgaccgtgcacatcctttggaaatcgttaaggaactaagaaatgcggtcgatgatcatgtgactgttacatgtgatatcggttcacatgcaatttggatgtcacgttattttaggagctacgaaccattaactttaatgatatctaacgggatgcaaactctgggggttgcacttccttgggctattggcgctagtttagttaagcccggtgagaaggtggtatcggtatcaggtgatggtggctttctgttttcggctatggaattagaaactgcagtccgtttaaaagctcccattgtgcatattgtctggaatgattctacttacgacatggttgcttttcaacagttgaagaaatacaatagaacttcggctgtagactttggtaacatcgatattgtgaaatatgctgagtcttttggcgcaacaggcctgagggtggaaagtccagatcagttagctgatgtgttgagacaagggatgaatgccgagggaccggtaatcatagatgtgccagttgactactcagacaatattaatttggcttctgataaacttcctaaagagtttggcgagctaatgaagaccaaagccttataaggatccataaaaaacacgctttttcagttcgagtttatcattatcaatactgccatttcaaagaatacgtaaataattaatagtagtgattttcctaactttatttagtcaaaaaattagccttttaattctgctgtaacccgtacatgcccaaaatagggggcgggttacacagaatatataacatcgtaggtgtctgggtgaacagtttattcctggcatccactaaatataatggagcccgctttttaagctggcatccagaaaaaaaaagaatcccagcaccaaaatattgttttcttcaccaaccatcagttcataggtccattctcttagcgcaactacagagaacaggggcacaaacaggcaaaaaacgggcacaacctcaatggagtgatgcaacctgcctggagtaaatgatgacacaaggcaattgacccacgcatgtatctatctcattttcttacaccttctattaccttctgctctctctgatttggaaaaagctgaaaaaaaaggttgaaaccagttccctgaaattattcccctacttgactaataagtatataaagacggtaggtattgattgtaattctgtaaatctatttcttaaacttcttaaattctacttttatagttagtcttttttttagttttaaaacaccaagaacttagtttcgaataaacacacataaacaaacaaaaagcttatggcacctgttacaattgaaaagttcgtaaatcaagaagaacgacaccttgtttccaaccgatcagcaacaattccgtttggtgaatacatatttaaaagattgttgtccatcgatacgaaatcagttttcggtgttcctggtgacttcaacttatctctattagaatatctctattcacctagtgttgaatcagctggcctaagatgggtcggcacgtgtaatgaactgaacgccgcttatgcggccgacggatattcccgttactctaataagattggctgtttaataaccacgtatggcgttggtgaattaagcgccttgaacggtatagccggttcgttcgctgaaaatgtcaaagttttgcacattgttggtgtggccaagtccatagattcgcgttcaagtaactttagtgatcggaacctacatcatttggtcccacagctacatgattcaaattttaaagggccaaatcataaagtatatcatgatatggtaaaagatagagtcgcttgctcggtagcctacttggaggatattgaaactgcatgtgaccaagtcgataatgttatccgcgatatttacaagtattctaaacctggttatatttttgttcctgcagattttgcggatatgtctgttacatgtgataatttggttaatgttccacgtatatctcaacaagattgtatagtatacccttctgaaaaccaattgtctgacataatcaacaagattactagttggatatattccagtaaaacacctgcgatccttggagacgtactgactgataggtatggtgtgagtaactttttgaacaagcttatctgcaaaactgggatttggaatttttccactgttatgggaaaatctgtaattgatgagtcaaacccaacttatatgggtcaatataatggtaaagaaggtttaaaacaagtctatgaacattttgaactgtgcgacttggtcttgcattttggagtcgacatcaatgaaattaataatgggcattatacttttacttataaaccaaatgctaaaatcattcaatttcatccgaattatattcgccttgtggacactaggcagggcaatgagcaaatgttcaaaggaatcaattttgcccctattttaaaagaactatacaagcgcattgacgtttctaaactttctttgcaatatgattcaaatgtaactcaatatacgaacgaaacaatgcggttagaagatcctaccaatggacaatcaagcattattacacaagttcacttacaaaagacgatgcctaaatttttgaaccctggtgatgttgtcgtttgtgaaacaggctcttttcaattctctgttcgtgatttcgcgtttccttcgcaattaaaatatatatcgcaaggatttttcctttccattggcatggcccttcctgccgccctaggtgttggaattgccatgcaagaccactcaaacgctcacatcaatggtggcaacgtaaaagaggactataagccaagattaattttgtttgaaggtgacggtgcagcacagatgacaatccaagaactgagcaccattctgaagtgcaatattccactagaagttatcatttggaacaataacggctacactattgaaagagccatcatgggccctaccaggtcgtataacgacgttatgtcttggaaatggaccaaactatttgaagcattcggagacttcgacggaaagtatactaatagcactctcattcaatgtccctctaaattagcactgaaattggaggagcttaagaattcaaacaaaagaagcgggatagaacttttagaagtcaaattaggcgaattggatttccccgaacagctaaagtgcatggttgaagcagcggcacttaaaagaaataaaaaagtgacacatggttataatgtgcagcgatacaatcagttacgtaaaaattttggattttatagagcatattcttcactaagaggttgtaagagcgttttcagacgtatataggctaggtcatgtaattagttatgtcacgcttacattcacgccctccccccacatccgctctaaccgaaaaggaaggagttagacaacctgaagtctaggtccctatttatttttttatagttatgttagtattaagaacgttatttatatttcaaatttttcttttttttctgtacagacgcgtgtacgcatgtaacattatactgaaaaccttgcttgagaaggttttgggacgctcgaaggctttaatttgcgggtgtacaatatggacttcctcttttctggcaaccaaacccatacatcgggattcctataataccttcgttggtctccctaacatgtaggtggcggaggggagatatacaatagaacagataccagacaagacataatgggctaaacaagactacaccaattacactgcctcattgatggtggtacataacgaactaatactgtagccctagacttgatagccatcatcatatcgaagtttcactaccctttttccatttgccatctattgaagtaataataggcgcatgcaacttcttttctttttttttcttttctctctcccccgttgttgtctcaccatatccgcaatgacaaaaaaatgatggaagacactaaaggaaaaaattaacgacaaagacagcaccaacagatgtcgttgttccagagctgatgaggggtatctcgaagcacacgaaactttttccttccttcattcacgcacactactctctaatgagcaacggtatacggccttccttccagttacttgaatttgaaataaaaaaaagtttgctgtcttgctatcaagtataaatagacctgcaattattaatcttttgtttcctcgtcattgttctcgttccctttcttccttgtttctttttctgcacaatatttcaagctataccaagcatacaatcaactatctcatatacacatatgttatatccagagaaattccaaggcattggtatctccaacgcaaaggattggaagcatcctaaacttgttagtttcgaccccaaacctttcggtgaccatgacgttgatgttgagattgaagcatgtggaatatgtgggagcgattttcatattgcagtaggcaattggggccctgttccggaaaatcaaattttgggtcacgaaattattggtagggtagtgaaggtgggttcaaaatgtcacacgggtgttaagattggtgatagggttggtgtaggtgcccaagcattggcttgtttcgaatgcgaaagatgcaaaagtgataacgaacaatactgtaccaacgatcatgttctaacaatgtggactccttacaaagatggatacatatctcaaggtggatttgcatcacatgttagattgcatgagcattttgcaattcaaattccggagaatatcccatcacctttggctgcaccattattgtgtgggggaataacagtgtttagtcctttattgagaaacggttgtggacctggtaagcgtgtggggattgttggcataggtggtattggtcacatggggatattactagctaaggccatgggagccgaagtttatgcgttcagtagaggacactccaagcgtgaagacagtatgaagttaggggcggaccattatattgccatgttggaggataaaggctggaccgaacaatattcaaatgctcttgatctgttagttgtgtgtagttcttctcttagtaaagttaattttgactcgattgtgaaaataatgaagattggcggctccattgtttccattgctgctccagaagttaacgagaagctggtactaaaaccactgggtctgatgggggtatctatctcatcttctgctatcggttcaagaaaagaaatagaacagctattaaagctagtcagcgagaaaaatgtgaagatttgggtagagaagctacccataagcgaggagggtgtatctcacgcatttacgagaatggaatccggagatgttaagtacaggtttacacttgtagactatgacaagaaattccataagtgagcggccgcataacaatactgacagtactaaataattgcctacttggcttcacatacgttgcatacgtcgatatagataataatgataatgacagcaggattatcgtaatacgtaatagttgaaaatctcaaaaatgtgtgggtcattacgtaaataatgataggaatgggattcttctatttttcctttttccattctagcagccgtcgggaaaacgtggcatcctctctttcgggctcaattggagtcacgctgccgtgagcatcctctctttccatatctaacaactgagcacgtaaccaatggaaaagcatgagcttagcgttgctccaaaaaagtattggatggttaataccatttgtctgttctcttctgactttgactcctcaaaaaaaaaaaatctacaatcaacagatcgcttcaattacgccctcacaaaaacttttttccttcttcttcgcccacgttaaattttatccctcatgttgtctaacggatttctgcacttgatttattataaaaagacaaagacataatacttctctatcaatttcagttattgttcttccttgcgttattcttctgttcttctttttcttttgtcatatataaccataaccaagtaatacatattcaaactcgagatgtccaaagctacttataaagaaagggctgcaacccatccatccccagtggcagctaaactgtttaacataatgcacgaaaaacaaactaacttatgcgcatcattagatgtaagaactactaaagagctactggagttggttgaggctttaggtccaaaaatttgtttgttgaagacacatgttgacatattaacagatttttctatggagggtaccgttaagcctctgaaagcgttaagcgcgaaatataactttcttttatttgaagaccgtaagtttgctgatattggaaatactgttaagttgcaatatagcgcaggagtttatagaattgccgaatgggctgacattacgaatgcccacggtgttgtaggtcctggcattgtgtctggattgaaacaagcggcagaggaagtgactaaggaaccaagaggtttactaatgctggcggaattatcttgcaaaggctctctagccaccggtgaatatacaaaaggtactgtggatattgcaaagtctgataaggacttcgtaatcggttttattgcacaaagagatatgggaggtcgtgagaattcaaaatgaagtgaagttcctatactttctagagaataggaacttctatagtgagtcgaataagggcgacacaaaatttattctaaatgcataataaatactgataacatcttatagtttgtattatattttgtattatcgttgacatgtataattttgatatcaaaaactgattttccctttattattttcgagatttattttcttaattctctttaacaaactagaaatattgtatatacaaaaaatcataaataatagatgaatagtttaattataggtgttcatcaatcgaaaaagcaacgtatcttatttaaagtgcgttgcttttttctcatttataaggttaaataattctcatatatcaagcaaagtgacaggcgcccttaaatattctgacaaatgctctttccctaaactccccccataaaaaaacccgccgaagcgggtttttacgttatttgcggattaacgattactcgttatcagaaccgcccagggggcccgagcttaagactggccgtcgttttacaacacagaaagagtttgtagaaacgcaaaaaggccatccgtcaggggccttctgcttagtttgatgcctggcagttccctactctcgccttccgcttcctcgctcactgactcgctgcgctcggtcgttcggctgcggcgagcggtatcagctcactcaaaggcggtaatacggttatccacagaatcaggggataacgcaggaaagaacatgtgagcaaaaggccagcaaaaggccaggaaccgtaaaaaggccgcgttgctggcgtttttccataggctccgcccccctgacgagcatcacaaaaatcgacgctcaagtcagaggtggcgaaacccgacaggactataaagataccaggcgtttccccctggaagctccctcgtgcgctctcctgttccgaccctgccgcttaccggatacctgtccgcctttctcccttcgggaagcgtggcgctttctcatagctcacgctgtaggtatctcagttcggtgtaggtcgttcgctccaagctgggctgtgtgcacgaaccccccgttcagcccgaccgctgcgccttatccggtaactatcgtcttgagtccaacccggtaagacacgacttatcgccactggcagcagccactggtaacaggattagcagagcgaggtatgtaggcggtgctacagagttcttgaagtggtgggctaactacggctacactagaagaacagtatttggtatctgcgctctgctgaagccagttaccttcggaaaaagagttggtagctcttgatccggcaaacaaaccaccgctggtagcggtggtttttttgtttgcaagcagcagattacgcgcagaaaaaaaggatctcaagaagatcctttgatcttttctacggggtctgacgctcagtggaacgacgcgcgcgtaactcacgttaagggattttggtcatgagcttgcgccgtcccgtcaagtcagcgtaatgctctgcttt

SEQ ID NO: 42 - DNA, 11302 bp, Artificial Sequence
  Plasmid pGV7005
tagaaaaactcatcgagcatcaaatgaaactgcaatttattcatatcaggattatcaataccatatttttgaaaaagccgtttctgtaatgaaggagaaaactcaccgaggcagttccataggatggcaagatcctggtatcggtctgcgattccgactcgtccaacatcaatacaacctattaatttcccctcgtcaaaaataaggttatcaagtgagaaatcaccatgagtgacgactgaatccggtgagaatggcaaaagtttatgcatttctttccagacttgttcaacaggccagccattacgctcgtcatcaaaatcactcgcatcaaccaaaccgttattcattcgtgattgcgcctgagcgaggcgaaatacgcgatcgctgttaaaaggacaattacaaacaggaatcgagtgcaaccggcgcaggaacactgccagcgcatcaacaatattttcacctgaatcaggatattcttctaatacctggaacgctgtttttccggggatcgcagtggtgagtaaccatgcatcatcaggagtacggataaaatgcttgatggtcggaagtggcataaattccgtcagccagtttagtctgaccatctcatctgtaacatcattggcaacgctacctttgccatgtttcagaaacaactctggcgcatcgggcttcccatacaagcgatagattgtcgcacctgattgcccgacattatcgcgagcccatttatacccatataaatcagcatccatgttggaatttaatcgcggcctcgacgtttcccgttgaatatggctcatattcttcctttttcaatattattgaagcatttatcagggttattgtctcatgagcggatacatatttgaatgtatttagaaaaataaacaaataggggtcagtgttacaaccaattaaccaattctgaacattatcgcgagcccatttatacctgaatatggctcataacaccccttgtttgcctggcggcagtagcgcggtggtcccacctgaccccatgccgaactcagaagtgaaacgccgtagcgccgatggtagtgtggggactccccatgcgagagtagggaactgccaggcatcaaataaaacgaaaggctcagtcgaaagactgggcctttcgcccgggctaattagggggtgtcgcccttattcgactctatagtgaagttcctattctctagaaagtataggaacttctgaagtggggaagcaaggcagaaactaacttcttcttcatgtaataaacacaccccgcgtttatttacctatctctaaacttcaacaccttatatcataactaatatttcttgagataagcacactgcacccataccttccttaaaaacgtagcttccagtttttggtggttccggcttccttcccgattccgcccgctaaacgcatatttttgttgcctggtggcatttgcaaaatgcataacctatgcatttaaaagattatgtatgctcttctgacttttcgtgtgatgaggctcgtggaaaaaatgaataatttatgaatttgagaacaattttgtgttgttacggtattttactatggaataatcaatcaattgaggattttatgcaaatatcgtttgaatatttttccgaccctttgagtacttttcttcataattgcataatattgtccgctgcccctttttctgttagacggtgtcttgatctacttgctatcgttcaacaccaccttattttctaactattttttttttagctcatttgaatcagcttatggtgatggcacatttttgcataaacctagctgtcctcgttgaacataggaaaaaaaaatatataaacaaggctctttcactctccttgcaatcagatttgggtttgttccctttattttcatatttcttgtcatattcctttctcaattattattttctactcataacctcacgcaaaataacacagtcaaatcaatcaaagtcgagatgatcagacaatctacgctaaaaaacttcgctattaagcgttgctttcaacatatagcataccgcaacacacctgccatgagatcagtagctctcgcgcagcgcttttatagttcgtcttcccgttattacagtgcgtctccattaccagcctctaaaaggccagagcctgctccaagtttcaatgttgatccattagaacagcccgctgaaccttcaaaattggctaagaaactacgcgctgagcctgacatggatacctctttcgtcggtttaactggtggtcaaatatttaacgaaatgatgtccagacaaaacgttgatactgtatttggttatccaggtggtgctatcctacctgtttacgatgccattcataacagtgataaattcaacttcgttcttccaaaacacgaacaaggtgccggtcacatggcagaaggctacgccagagcttctggtaaaccaggtgttgtcttggttacttctgggccaggtgccaccaatgtcgttactccaatggcagatgcctttgcagacgggattccaatggttgtctttacagggcaagtcccaactagtgctatcggtactgatgctttccaagaggctgacgtcgttggtatttctagatcttgtacgaaatggaatgtcatggtcaagtccgtggaagaattgccattgcgtattaacgaggcttttgaaattgccacgagcggtagaccgggaccagtcttggtcgatttaccaaaggatgttacagcagctatcttaagaaatccaattccaacaaaaacaactcttccatcaaacgcactaaaccaattaaccagtcgcgcacaagatgaatttgtcatgcaaagtatcaataaagcagcagatttgatcaacttggcaaagaaacctgtcttatacgtcggtgctggtattttaaaccatgcagatggtccaagattactaaaagaattaagtgaccgtgctcaaatacctgtcaccactactttacaaggtttaggttcattcgaccaagaagatccaaaatcattggatatgcttggtatgcacggttgtgctactgccaacctggcagtgcaaaatgccgacttgataattgcagttggtgctagattcgacgaccgtgtcactggtaatatttctaaattcgctccagaagctcgtcgtgcagctgccgagggtagaggtggtattattcatttcgaggttagtccaaaaaacataaacaaggttgttcaaactcaaatagcagtggaaggtgatgctacgaccaatctgggcaaaatgatgtcaaagattttcccagttaaggagaggtctgaatggtttgctcaaataaataaatggaagaaggaatacccatacgcttatatggaggagactccaggatctaaaattaaaccacagacggttataaagaaactatccaaggttgccaacgacacaggaagacatgtcattgttacaacgggtgtggggcaacatcaaatgtgggctgctcaacactggacatggagaaatccacatactttcatcacatcaggtggtttaggtacgatgggttacggtctccctgccgccatcggtgctcaagttgcaaagccagaatctttggttattgacattgatggtgacgcatcctttaacatgactctaacggaattgagttctgccgttcaagctggtactccagtgaagattttgattttgaacaatgaagagcaaggtatggttactcaatggcaatccctgttctacgaacatcgttattcccacacacatcaattgaaccctgatttcataaaactagcggaggctatgggtttaaaaggtttaagagtcaagaagcaagaggaattggacgctaagttgaaagaattcgtttctaccaagggcccagttttgcttgaagtggaagttgataaaaaagttcctgttttgccaatggtggcaggtggtagcggtctagacgagttcataaattttgacccagaagttgaaagacaacagactgaattacgtcataagcgtacaggcggtaagcactgaggatccataaaaaacacgctttttcagttcgagtttatcattatcaatactgccatttcaaagaatacgtaaataattaatagtagtgattttcctaactttatttagtcaaaaaattagccttttaattctgctgtaacccgtacatgcccaaaatagggggcgggttacacagaatatataacatcgtaggtgtctgggtgaacagtttattcctggcatccactaaatataatggagcccgctttttaagctggcatccagaaaaaaaaagaatcccagcaccaaaatattgttttcttcaccaaccatcagttcataggtccattctcttagcgcaactacagagaacaggggcacaaacaggcaaaaaacgggcacaacctcaatggagtgatgcaacctgcctggagtaaatgatgacacaaggcaattgacccacgcatgtatctatctcattttcttacaccttctattaccttctgctctctctgatttggaaaaagctgaaaaaaaaggttgaaaccagttccctgaaattattcccctacttgactaataagtatataaagacggtaggtattgattgtaattctgtaaatctatttcttaaacttcttaaattctacttttatagttagtcttttttttagttttaaaacaccaagaacttagtttcgaataaacacacataaacaaacaaaaagcttatgtatactgttggagattatttgttagatagattgcatgaactaggcattgaagaaattttcggagttcccggggattacaatctgcaatttctagaccagattatttcacataaagacatgaaatgggtcggaaatgcaaatgagttaaatgcatcttacatggccgatggttatgccagaaccaaaaaggcggctgctttcttgactaccttcggggtgggtgaattatcggcagttaatggcttggctggatcatacgcagaaaacttgcctgtcgttgaaatcgttggctcgccaacatcaaaagttcaaaatgaaggaaaattcgtccaccacactttggcagatggtgacttcaagcacttcatgaaaatgcatgaacctgtaacggctgccagaactctactaactgctgagaatgcaactgtagagattgatcgtgtcttgagcgctcttttaaaggaaagaaagccagtctatattaacctgccagtagacgtcgcagcggccaaagcagagaagcctagcttaccacttaaaaaggaaaatagtacctcaaacacttcagatcaagagattcttaacaagatccaggaatctttgaaaaacgctaaaaagcccattgttataactggccatgagatcatatcatttggtttggagaaaacagtgacccagttcattagtaagacgaaactgccaataaccactctaaatttcggtaagtcctccgttgatgaagcgttgcctagcttcttgggtatttacaacggcaccttgtcagaacccaatctgaaagaatttgttgaatctgcagactttatattgatgttgggagtaaagttgactgacagctctactggtgcttttacacaccatctgaatgaaaacaagatgatatctcttaatatcgatgaaggtaagatattcaatgaaagaatacagaacttcgacttcgagagtctaatttcttccttactggacttaagtgaaatcgagtataaaggtaagtacattgacaaaaagcaggaagattttgttccgagcaacgcgctacttagtcaagatagattatggcaagctgttgaaaatctgacacaatccaatgagacaattgttgccgaacaaggtacctccttttttggcgcttcttccatcttcctaaagtccaagtctcatttcatagggcagccattgtggggtagcatcggttacacctttcctgctgctctagggtcccaaattgctgataaagaaagtagacatttgttgtttataggagacggatctttacaattgacagttcaagagttaggtttagccatcagagagaagattaatcctatctgcttcataataaacaacgatggctatacagttgagagggaaattcatggacctaatcaatcttataatgatataccaatgtggaattatagcaagttacctgaatcttttggggctaccgaggatcgtgttgtttctaagattgtaagaaccgaaaatgaatttgtttctgttatgaaggaagcacaagcggaccctaacaggatgtactggattgagttaattcttgctaaggagggtgcgccaaaggttctaaagaagatgggtaagttgttcgccgaacaaaacaaatccgtgacacatggttataatgtgcagcgatacaatcagttacgtaaaaattttggattttatagagcatattcttcactaagaggttgtaagagcgttttcagacgtatataggctaggtcatgtaattagttatgtcacgcttacattcacgccctccccccacatccgctctaaccgaaaaggaaggagttagacaacctgaagtctaggtccctatttatttttttatagttatgttagtattaagaacgttatttatatttcaaatttttcttttttttctgtacagacgcgtgtacgcatgtaacattatactgaaaaccttgcttgagaaggttttgggacgctcgaaggctttaatttgcgggtgtacaatatggacttcctcttttctggcaaccaaacccatacatcgggattcctataataccttcgttggtctccctaacatgtaggtggcggaggggagatatacaatagaacagataccagacaagacataatgggctaaacaagactacaccaattacactgcctcattgatggtggtacataacgaactaatactgtagccctagacttgatagccatcatcatatcgaagtttcactaccctttttccatttgccatctattgaagtaataataggcgcatgcaacttcttttctttttttttcttttctctctcccccgttgttgtctcaccatatccgcaatgacaaaaaaatgatggaagacactaaaggaaaaaattaacgacaaagacagcaccaacagatgtcgttgttccagagctgatgaggggtatctcgaagcacacgaaactttttccttccttcattcacgcacactactctctaatgagcaacggtatacggccttccttccagttacttgaatttgaaataaaaaaaagtttgctgtcttgctatcaagtataaatagacctgcaattattaatcttttgtttcctcgtcattgttctcgttccctttcttccttgtttctttttctgcacaatatttcaagctataccaagcatacaatcaactatctcatatacacatatgttatatccagagaaattccaaggcattggtatctccaacgcaaaggattggaagcatcctaaacttgttagtttcgaccccaaacctttcggtgaccatgacgttgatgttgagattgaagcatgtggaatatgtgggagcgattttcatattgcagtaggcaattggggccctgttccggaaaatcaaattttgggtcacgaaattattggtagggtagtgaaggtgggttcaaaatgtcacacgggtgttaagattggtgatagggttggtgtaggtgcccaagcattggcttgtttcgaatgcgaaagatgcaaaagtgataacgaacaatactgtaccaacgatcatgttctaacaatgtggactccttacaaagatggatacatatctcaaggtggatttgcatcacatgttagattgcatgagcattttgcaattcaaattccggagaatatcccatcacctttggctgcaccattattgtgtgggggaataacagtgtttagtcctttattgagaaacggttgtggacctggtaagcgtgtggggattgttggcataggtggtattggtcacatggggatattactagctaaggccatgggagccgaagtttatgcgttcagtagaggacactccaagcgtgaagacagtatgaagttaggggcggaccattatattgccatgttggaggataaaggctggaccgaacaatattcaaatgctcttgatctgttagttgtgtgtagttcttctcttagtaaagttaattttgactcgattgtgaaaataatgaagattggcggctccattgtttccattgctgctccagaagttaacgagaagctggtactaaaaccactgggtctgatgggggtatctatctcatcttctgctatcggttcaagaaaagaaatagaacagctattaaagctagtcagcgagaaaaatgtgaagatttgggtagagaagctacccataagcgaggagggtgtatctcacgcatttacgagaatggaatccggagatgttaagtacaggtttacacttgtagactatgacaagaaattccataagtgagcggccgcataacaatactgacagtactaaataattgcctacttggcttcacatacgttgcatacgtcgatatagataataatgataatgacagcaggattatcgtaatacgtaatagttgaaaatctcaaaaatgtgtgggtcattacgtaaataatgataggaatgggattcttctatttttcctttttccattctagcagccgtcgggaaaacgtggcatcctctctttcgggctcaattggagtcacgctgccgtgagcatcctctctttccatatctaacaactgagcacgtaaccaatggaaaagcatgagcttagcgttgctccaaaaaagtattggatggttaataccatttgtctgttctcttctgactttgactcctcaaaaaaaaaaaatctacaatcaacagatcgcttcaattacgccctcacaaaaacttttttccttcttcttcgcccacgttaaattttatccctcatgttgtctaacggatttctgcacttgatttattataaaaagacaaagacataatacttctctatcaatttcagttattgttcttccttgcgttattcttctgttcttctttttcttttgtcatatataaccataaccaagtaatacatattcaaactcgagatgtccaaagctacttataaagaaagggctgcaacccatccatccccagtggcagctaaactgtttaacataatgcacgaaaaacaaactaacttatgcgcatcattagatgtaagaactactaaagagctactggagttggttgaggctttaggtccaaaaatttgtttgttgaagacacatgttgacatattaacagatttttctatggagggtaccgttaagcctctgaaagcgttaagcgcgaaatataactttcttttatttgaagaccgtaagtttgctgatattggaaatactgttaagttgcaatatagcgcaggagtttatagaattgccgaatgggctgacattacgaatgcccacggtgttgtaggtcctggcattgtgtctggattgaaacaagcggcagaggaagtgactaaggaaccaagaggtttactaatgctggcggaattatcttgcaaaggctctctagccaccggtgaatatacaaaaggtactgtggatattgcaaagtctgataaggacttcgtaatcggttttattgcacaaagagatatgggaggtcgtgagaattcaaaatgaagtgaagttcctatactttctagagaataggaacttctatagtgagtcgaataagggcgacacaaaatttattctaaatgcataataaatactgataacatcttatagtttgtattatattttgtattatcgttgacatgtataattttgatatcaaaaactgattttccctttattattttcgagatttattttcttaattctctttaacaaactagaaatattgtatatacaaaaaatcataaataatagatgaatagtttaattataggtgttcatcaatcgaaaaagcaacgtatcttatttaaagtgcgttgcttttttctcatttataaggttaaataattctcatatatcaagcaaagtgacaggcgcccttaaatattctgacaaatgctctttccctaaactccccccataaaaaaacccgccgaagcgggtttttacgttatttgcggattaacgattactcgttatcagaaccgcccagggggcccgagcttaagactggccgtcgttttacaacacagaaagagtttgtagaaacgcaaaaaggccatccgtcaggggccttctgcttagtttgatgcctggcagttccctactctcgccttccgcttcctcgctcactgactcgctgcgctcggtcgttcggctgcggcgagcggtatcagctcactcaaaggcggtaatacggttatccacagaatcaggggataacgcaggaaagaacatgtgagcaaaaggccagcaaaaggccaggaaccgtaaaaaggccgcgttgctggcgtttttccataggctccgcccccctgacgagcatcacaaaaatcgacgctcaagtcagaggtggcgaaacccgacaggactataaagataccaggcgtttccccctggaagctccctcgtgcgctctcctgttccgaccctgccgcttaccggatacctgtccgcctttctcccttcgggaagcgtggcgctttctcatagctcacgctgtaggtatctcagttcggtgtaggtcgttcgctccaagctgggctgtgtgcacgaaccccccgttcagcccgaccgctgcgccttatccggtaactatcgtcttgagtccaacccggtaagacacgacttatcgccactggcagcagccactggtaacaggattagcagagcgaggtatgtaggcggtgctacagagttcttgaagtggtgggctaactacggctacactagaagaacagtatttggtatctgcgctctgctgaagccagttaccttcggaaaaagagttggtagctcttgatccggcaaacaaaccaccgctggtagcggtggtttttttgtttgcaagcagcagattacgcgcagaaaaaaaggatctcaagaagatcctttgatcttttctacggggtctgacgctcagtggaacgacgcgcgcgtaactcacgttaagggattttggtcatgagcttgcgccgtcccgtcaagtcagcgtaatgctctgcttt

SEQ ID NO: 43 - DNA, 11563 bp, Artificial Sequence
  Plasmid pGV7006
tagaaaaactcatcgagcatcaaatgaaactgcaatttattcatatcaggattatcaataccatatttttgaaaaagccgtttctgtaatgaaggagaaaactcaccgaggcagttccataggatggcaagatcctggtatcggtctgcgattccgactcgtccaacatcaatacaacctattaatttcccctcgtcaaaaataaggttatcaagtgagaaatcaccatgagtgacgactgaatccggtgagaatggcaaaagtttatgcatttctttccagacttgttcaacaggccagccattacgctcgtcatcaaaatcactcgcatcaaccaaaccgttattcattcgtgattgcgcctgagcgaggcgaaatacgcgatcgctgttaaaaggacaattacaaacaggaatcgagtgcaaccggcgcaggaacactgccagcgcatcaacaatattttcacctgaatcaggatattcttctaatacctggaacgctgtttttccggggatcgcagtggtgagtaaccatgcatcatcaggagtacggataaaatgcttgatggtcggaagtggcataaattccgtcagccagtttagtctgaccatctcatctgtaacatcattggcaacgctacctttgccatgtttcagaaacaactctggcgcatcgggcttcccatacaagcgatagattgtcgcacctgattgcccgacattatcgcgagcccatttatacccatataaatcagcatccatgttggaatttaatcgcggcctcgacgtttcccgttgaatatggctcatattcttcctttttcaatattattgaagcatttatcagggttattgtctcatgagcggatacatatttgaatgtatttagaaaaataaacaaataggggtcagtgttacaaccaattaaccaattctgaacattatcgcgagcccatttatacctgaatatggctcataacaccccttgtttgcctggcggcagtagcgcggtggtcccacctgaccccatgccgaactcagaagtgaaacgccgtagcgccgatggtagtgtggggactccccatgcgagagtagggaactgccaggcatcaaataaaacgaaaggctcagtcgaaagactgggcctttcgcccgggctaattagggggtgtcgcccttattcgactctatagtgaagttcctattctctagaaagtataggaacttctgaagtggggaagcaaggcagaaactaacttcttcttcatgtaataaacacaccccgcgtttatttacctatctctaaacttcaacaccttatatcataactaatatttcttgagataagcacactgcacccataccttccttaaaaacgtagcttccagtttttggtggttccggcttccttcccgattccgcccgctaaacgcatatttttgttgcctggtggcatttgcaaaatgcataacctatgcatttaaaagattatgtatgctcttctgacttttcgtgtgatgaggctcgtggaaaaaatgaataatttatgaatttgagaacaattttgtgttgttacggtattttactatggaataatcaatcaattgaggattttatgcaaatatcgtttgaatatttttccgaccctttgagtacttttcttcataattgcataatattgtccgctgcccctttttctgttagacggtgtcttgatctacttgctatcgttcaacaccaccttattttctaactattttttttttagctcatttgaatcagcttatggtgatggcacatttttgcataaacctagctgtcctcgttgaacataggaaaaaaaaatatataaacaaggctctttcactctccttgcaatcagatttgggtttgttccctttattttcatatttcttgtcatattcctttctcaattattattttctactcataacctcacgcaaaataacacagtcaaatcaatcaaagtcgagatgatcagacaatctacgctaaaaaacttcgctattaagcgttgctttcaacatatagcataccgcaacacacctgccatgagatcagtagctctcgcgcagcgcttttatagttcgtcttcccgttattacagtgcgtctccattaccagcctctaaaaggccagagcctgctccaagtttcaatgttgatccattagaacagcccgctgaaccttcaaaattggctaagaaactacgcgctgagcctgacatggatacctctttcgtcggtttaactggtggtcaaatatttaacgaaatgatgtccagacaaaacgttgatactgtatttggttatccaggtggtgctatcctacctgtttacgatgccattcataacagtgataaattcaacttcgttcttccaaaacacgaacaaggtgccggtcacatggcagaaggctacgccagagcttctggtaaaccaggtgttgtcttggttacttctgggccaggtgccaccaatgtcgttactccaatggcagatgcctttgcagacgggattccaatggttgtctttacagggcaagtcccaactagtgctatcggtactgatgctttccaagaggctgacgtcgttggtatttctagatcttgtacgaaatggaatgtcatggtcaagtccgtggaagaattgccattgcgtattaacgaggcttttgaaattgccacgagcggtagaccgggaccagtcttggtcgatttaccaaaggatgttacagcagctatcttaagaaatccaattccaacaaaaacaactcttccatcaaacgcactaaaccaattaaccagtcgcgcacaagatgaatttgtcatgcaaagtatcaataaagcagcagatttgatcaacttggcaaagaaacctgtcttatacgtcggtgctggtattttaaaccatgcagatggtccaagattactaaaagaattaagtgaccgtgctcaaatacctgtcaccactactttacaaggtttaggttcattcgaccaagaagatccaaaatcattggatatgcttggtatgcacggttgtgctactgccaacctggcagtgcaaaatgccgacttgataattgcagttggtgctagattcgacgaccgtgtcactggtaatatttctaaattcgctccagaagctcgtcgtgcagctgccgagggtagaggtggtattattcatttcgaggttagtccaaaaaacataaacaaggttgttcaaactcaaatagcagtggaaggtgatgctacgaccaatctgggcaaaatgatgtcaaagattttcccagttaaggagaggtctgaatggtttgctcaaataaataaatggaagaaggaatacccatacgcttatatggaggagactccaggatctaaaattaaaccacagacggttataaagaaactatccaaggttgccaacgacacaggaagacatgtcattgttacaacgggtgtggggcaacatcaaatgtgggctgctcaacactggacatggagaaatccacatactttcatcacatcaggtggtttaggtacgatgggttacggtctccctgccgccatcggtgctcaagttgcaaagccagaatctttggttattgacattgatggtgacgcatcctttaacatgactctaacggaattgagttctgccgttcaagctggtactccagtgaagattttgattttgaacaatgaagagcaaggtatggttactcaatggcaatccctgttctacgaacatcgttattcccacacacatcaattgaaccctgatttcataaaactagcggaggctatgggtttaaaaggtttaagagtcaagaagcaagaggaattggacgctaagttgaaagaattcgtttctaccaagggcccagttttgcttgaagtggaagttgataaaaaagttcctgttttgccaatggtggcaggtggtagcggtctagacgagttcataaattttgacccagaagttgaaagacaacagactgaattacgtcataagcgtacaggcggtaagcactgaggatccataaaaaacacgctttttcagttcgagtttatcattatcaatactgccatttcaaagaatacgtaaataattaatagtagtgattttcctaactttatttagtcaaaaaattagccttttaattctgctgtaacccgtacatgcccaaaatagggggcgggttacacagaatatataacatcgtaggtgtctgggtgaacagtttattcctggcatccactaaatataatggagcccgctttttaagctggcatccagaaaaaaaaagaatcccagcaccaaaatattgttttcttcaccaaccatcagttcataggtccattctcttagcgcaactacagagaacaggggcacaaacaggcaaaaaacgggcacaacctcaatggagtgatgcaacctgcctggagtaaatgatgacacaaggcaattgacccacgcatgtatctatctcattttcttacaccttctattaccttctgctctctctgatttggaaaaagctgaaaaaaaaggttgaaaccagttccctgaaattattcccctacttgactaataagtatataaagacggtaggtattgattgtaattctgtaaatctatttcttaaacttcttaaattctacttttatagttagtcttttttttagttttaaaacaccaagaacttagtttcgaataaacacacataaacaaacaaaaagcttatggcacctgttacaattgaaaagttcgtaaatcaagaagaacgacaccttgtttccaaccgatcagcaacaattccgtttggtgaatacatatttaaaagattgttgtccatcgatacgaaatcagttttcggtgttcctggtgacttcaacttatctctattagaatatctctattcacctagtgttgaatcagctggcctaagatgggtcggcacgtgtaatgaactgaacgccgcttatgcggccgacggatattcccgttactctaataagattggctgtttaataaccacgtatggcgttggtgaattaagcgccttgaacggtatagccggttcgttcgctgaaaatgtcaaagttttgcacattgttggtgtggccaagtccatagattcgcgttcaagtaactttagtgatcggaacctacatcatttggtcccacagctacatgattcaaattttaaagggccaaatcataaagtatatcatgatatggtaaaagatagagtcgcttgctcggtagcctacttggaggatattgaaactgcatgtgaccaagtcgataatgttatccgcgatatttacaagtattctaaacctggttatatttttgttcctgcagattttgcggatatgtctgttacatgtgataatttggttaatgttccacgtatatctcaacaagattgtatagtatacccttctgaaaaccaattgtctgacataatcaacaagattactagttggatatattccagtaaaacacctgcgatccttggagacgtactgactgataggtatggtgtgagtaactttttgaacaagcttatctgcaaaactgggatttggaatttttccactgttatgggaaaatctgtaattgatgagtcaaacccaacttatatgggtcaatataatggtaaagaaggtttaaaacaagtctatgaacattttgaactgtgcgacttggtcttgcattttggagtcgacatcaatgaaattaataatgggcattatacttttacttataaaccaaatgctaaaatcattcaatttcatccgaattatattcgccttgtggacactaggcagggcaatgagcaaatgttcaaaggaatcaattttgcccctattttaaaagaactatacaagcgcattgacgtttctaaactttctttgcaatatgattcaaatgtaactcaatatacgaacgaaacaatgcggttagaagatcctaccaatggacaatcaagcattattacacaagttcacttacaaaagacgatgcctaaatttttgaaccctggtgatgttgtcgtttgtgaaacaggctcttttcaattctctgttcgtgatttcgcgtttccttcgcaattaaaatatatatcgcaaggatttttcctttccattggcatggcccttcctgccgccctaggtgttggaattgccatgcaagaccactcaaacgctcacatcaatggtggcaacgtaaaagaggactataagccaagattaattttgtttgaaggtgacggtgcagcacagatgacaatccaagaactgagcaccattctgaagtgcaatattccactagaagttatcatttggaacaataacggctacactattgaaagagccatcatgggccctaccaggtcgtataacgacgttatgtcttggaaatggaccaaactatttgaagcattcggagacttcgacggaaagtatactaatagcactctcattcaatgtccctctaaattagcactgaaattggaggagcttaagaattcaaacaaaagaagcgggatagaacttttagaagtcaaattaggcgaattggatttccccgaacagctaaagtgcatggttgaagcagcggcacttaaaagaaataaaaaagtgacacatggttataatgtgcagcgatacaatcagttacgtaaaaattttggattttatagagcatattcttcactaagaggttgtaagagcgttttcagacgtatataggctaggtcatgtaattagttatgtcacgcttacattcacgccctccccccacatccgctctaaccgaaaaggaaggagttagacaacctgaagtctaggtccctatttatttttttatagttatgttagtattaagaacgttatttatatttcaaatttttcttttttttctgtacagacgcgtgtacgcatgtaacattatactgaaaaccttgcttgagaaggttttgggacgctcgaaggctttaatttgcgggtgtacaatatggacttcctcttttctggcaaccaaacccatacatcgggattcctataataccttcgttggtctccctaacatgtaggtggcggaggggagatatacaatagaacagataccagacaagacataatgggctaaacaagactacaccaattacactgcctcattgatggtggtacataacgaactaatactgtagccctagacttgatagccatcatcatatcgaagtttcactaccctttttccatttgccatctattgaagtaataataggcgcatgcaacttcttttctttttttttcttttctctctcccccgttgttgtctcaccatatccgcaatgacaaaaaaatgatggaagacactaaaggaaaaaattaacgacaaagacagcaccaacagatgtcgttgttccagagctgatgaggggtatctcgaagcacacgaaactttttccttccttcattcacgcacactactctctaatgagcaacggtatacggccttccttccagttacttgaatttgaaataaaaaaaagtttgctgtcttgctatcaagtataaatagacctgcaattattaatcttttgtttcctcgtcattgttctcgttccctttcttccttgtttctttttctgcacaatatttcaagctataccaagcatacaatcaactatctcatatacacatatgttatatccagagaaattccaaggcattggtatctccaacgcaaaggattggaagcatcctaaacttgttagtttcgaccccaaacctttcggtgaccatgacgttgatgttgagattgaagcatgtggaatatgtgggagcgattttcatattgcagtaggcaattggggccctgttccggaaaatcaaattttgggtcacgaaattattggtagggtagtgaaggtgggttcaaaatgtcacacgggtgttaagattggtgatagggttggtgtaggtgcccaagcattggcttgtttcgaatgcgaaagatgcaaaagtgataacgaacaatactgtaccaacgatcatgttctaacaatgtggactccttacaaagatggatacatatctcaaggtggatttgcatcacatgttagattgcatgagcattttgcaattcaaattccggagaatatcccatcacctttggctgcaccattattgtgtgggggaataacagtgtttagtcctttattgagaaacggttgtggacctggtaagcgtgtggggattgttggcataggtggtattggtcacatggggatattactagctaaggccatgggagccgaagtttatgcgttcagtagaggacactccaagcgtgaagacagtatgaagttaggggcggaccattatattgccatgttggaggataaaggctggaccgaacaatattcaaatgctcttgatctgttagttgtgtgtagttcttctcttagtaaagttaattttgactcgattgtgaaaataatgaagattggcggctccattgtttccattgctgctccagaagttaacgagaagctggtactaaaaccactgggtctgatgggggtatctatctcatcttctgctatcggttcaagaaaagaaatagaacagctattaaagctagtcagcgagaaaaatgtgaagatttgggtagagaagctacccataagcgaggagggtgtatctcacgcatttacgagaatggaatccggagatgttaagtacaggtttacacttgtagactatgacaagaaattccataagtgagcggccgcataacaatactgacagtactaaataattgcctacttggcttcacatacgttgcatacgtcgatatagataataatgataatgacagcaggattatcgtaatacgtaatagttgaaaatctcaaaaatgtgtgggtcattacgtaaataatgataggaatgggattcttctatttttcctttttccattctagcagccgtcgggaaaacgtggcatcctctctttcgggctcaattggagtcacgctgccgtgagcatcctctctttccatatctaacaactgagcacgtaaccaatggaaaagcatgagcttagcgttgctccaaaaaagtattggatggttaataccatttgtctgttctcttctgactttgactcctcaaaaaaaaaaaatctacaatcaacagatcgcttcaattacgccctcacaaaaacttttttccttcttcttcgcccacgttaaattttatccctcatgttgtctaacggatttctgcacttgatttattataaaaagacaaagacataatacttctctatcaatttcagttattgttcttccttgcgttattcttctgttcttctttttcttttgtcatatataaccataaccaagtaatacatattcaaactcgagatgtccaaagctacttataaagaaagggctgcaacccatccatccccagtggcagctaaactgtttaacataatgcacgaaaaacaaactaacttatgcgcatcattagatgtaagaactactaaagagctactggagttggttgaggctttaggtccaaaaatttgtttgttgaagacacatgttgacatattaacagatttttctatggagggtaccgttaagcctctgaaagcgttaagcgcgaaatataactttcttttatttgaagaccgtaagtttgctgatattggaaatactgttaagttgcaatatagcgcaggagtttatagaattgccgaatgggctgacattacgaatgcccacggtgttgtaggtcctggcattgtgtctggattgaaacaagcggcagaggaagtgactaaggaaccaagaggtttactaatgctggcggaattatcttgcaaaggctctctagccaccggtgaatatacaaaaggtactgtggatattgcaaagtctgataaggacttcgtaatcggttttattgcacaaagagatatgggaggtcgtgagaattcaaaatgaagtgaagttcctatactttctagagaataggaacttctatagtgagtcgaataagggcgacacaaaatttattctaaatgcataataaatactgataacatcttatagtttgtattatattttgtattatcgttgacatgtataattttgatatcaaaaactgattttccctttattattttcgagatttattttcttaattctctttaacaaactagaaatattgtatatacaaaaaatcataaataatagatgaatagtttaattataggtgttcatcaatcgaaaaagcaacgtatcttatttaaagtgcgttgcttttttctcatttataaggttaaataattctcatatatcaagcaaagtgacaggcgcccttaaatattctgacaaatgctctttccctaaactccccccataaaaaaacccgccgaagcgggtttttacgttatttgcggattaacgattactcgttatcagaaccgcccagggggcccgagcttaagactggccgtcgttttacaacacagaaagagtttgtagaaacgcaaaaaggccatccgtcaggggccttctgcttagtttgatgcctggcagttccctactctcgccttccgcttcctcgctcactgactcgctgcgctcggtcgttcggctgcggcgagcggtatcagctcactcaaaggcggtaatacggttatccacagaatcaggggataacgcaggaaagaacatgtgagcaaaaggccagcaaaaggccaggaaccgtaaaaaggccgcgttgctggcgtttttccataggctccgcccccctgacgagcatcacaaaaatcgacgctcaagtcagaggtggcgaaacccgacaggactataaagataccaggcgtttccccctggaagctccctcgtgcgctctcctgttccgaccctgccgcttaccggatacctgtccgcctttctcccttcgggaagcgtggcgctttctcatagctcacgctgtaggtatctcagttcggtgtaggtcgttcgctccaagctgggctgtgtgcacgaaccccccgttcagcccgaccgctgcgccttatccggtaactatcgtcttgagtccaacccggtaagacacgacttatcgccactggcagcagccactggtaacaggattagcagagcgaggtatgtaggcggtgctacagagttcttgaagtggtgggctaactacggctacactagaagaacagtatttggtatctgcgctctgctgaagccagttaccttcggaaaaagagttggtagctcttgatccggcaaacaaaccaccgctggtagcggtggtttttttgtttgcaagcagcagattacgcgcagaaaaaaaggatctcaagaagatcctttgatcttttctacggggtctgacgctcagtggaacgacgcgcgcgtaactcacgttaagggattttggtcatgagcttgcgccgtcccgtcaagtcagcgtaatgctctgcttt

SEQ ID NO: 44 - DNA, 11131 bp, Artificial Sequence
  Plasmid pGV7102
tagaaaaactcatcgagcatcaaatgaaactgcaatttattcatatcaggattatcaataccatatttttgaaaaagccgtttctgtaatgaaggagaaaactcaccgaggcagttccataggatggcaagatcctggtatcggtctgcgattccgactcgtccaacatcaatacaacctattaatttcccctcgtcaaaaataaggttatcaagtgagaaatcaccatgagtgacgactgaatccggtgagaatggcaaaagtttatgcatttctttccagacttgttcaacaggccagccattacgctcgtcatcaaaatcactcgcatcaaccaaaccgttattcattcgtgattgcgcctgagcgaggcgaaatacgcgatcgctgttaaaaggacaattacaaacaggaatcgagtgcaaccggcgcaggaacactgccagcgcatcaacaatattttcacctgaatcaggatattcttctaatacctggaacgctgtttttccggggatcgcagtggtgagtaaccatgcatcatcaggagtacggataaaatgcttgatggtcggaagtggcataaattccgtcagccagtttagtctgaccatctcatctgtaacatcattggcaacgctacctttgccatgtttcagaaacaactctggcgcatcgggcttcccatacaagcgatagattgtcgcacctgattgcccgacattatcgcgagcccatttatacccatataaatcagcatccatgttggaatttaatcgcggcctcgacgtttcccgttgaatatggctcatattcttcctttttcaatattattgaagcatttatcagggttattgtctcatgagcggatacatatttgaatgtatttagaaaaataaacaaataggggtcagtgttacaaccaattaaccaattctgaacattatcgcgagcccatttatacctgaatatggctcataacaccccttgtttgcctggcggcagtagcgcggtggtcccacctgaccccatgccgaactcagaagtgaaacgccgtagcgccgatggtagtgtggggactccccatgcgagagtagggaactgccaggcatcaaataaaacgaaaggctcagtcgaaagactgggcctttcgcccgggctaattagggggtgtcgcccttattcgactctatagtgaagttcctattctctagaaagtataggaacttctgaagtggggaagcaaggcagaaactaacttcttcttcatgtaataaacacaccccgcgtttatttacctatctctaaacttcaacaccttatatcataactaatatttcttgagataagcacactgcacccataccttccttaaaaacgtagcttccagtttttggtggttccggcttccttcccgattccgcccgctaaacgcatatttttgttgcctggtggcatttgcaaaatgcataacctatgcatttaaaagattatgtatgctcttctgacttttcgtgtgatgaggctcgtggaaaaaatgaataatttatgaatttgagaacaattttgtgttgttacggtattttactatggaataatcaatcaattgaggattttatgcaaatatcgtttgaatatttttccgaccctttgagtacttttcttcataattgcataatattgtccgctgcccctttttctgttagacggtgtcttgatctacttgctatcgttcaacaccaccttattttctaactattttttttttagctcatttgaatcagcttatggtgatggcacatttttgcataaacctagctgtcctcgttgaacataggaaaaaaaaatatataaacaaggctctttcactctccttgcaatcagatttgggtttgttccctttattttcatatttcttgtcatattcctttctcaattattattttctactcataacctcacgcaaaataacacagtcaaatcaatcaaagtcgagatgctttcactacgtcaatctataagatttttcaagccagccacaagaactttgtgtagctctagatatctgcttcagcaaaaacccgtggtgatgttgactaaagctacaaaagagcagaaatcattggtgaaaaataggggtgcagaacttgttgtggactgtttggtagaacagggcgtaacacatgtttttggtatcccaggtgcaaaaatcgacgccgtgtttgatgcattacaagacaagggtccagaaattattgttgctagacatgagcaaaatgccgcatttatggcgcaagctgtaggtaggcttacaggtaaacctggtgttgtcctagttacgtctggcccaggagcctccaatttagcaactggtctattgacagctaatactgagggagatcctgtagttgcgttagccggtaatgtaattagagctgataggcttaagagaactcaccagtctctagacaacgctgctttattccaaccgatcaccaagtactcagtagaggtacaagacgtaaagaatatacctgaagctgtgacaaacgcatttcgtatagcttctgctggtcaggctggtgccgcgtttgtttcttttcctcaagacgttgtcaatgaagtgaccaatactaaaaacgttagagcggttgcagcccctaaactaggtccagccgcagacgacgcaattagcgctgcaattgctaaaattcagacggcgaaactaccagtagtccttgtcggtatgaagggcggaagaccagaagcaataaaagctgttcgtaagttattgaagaaagtccaattacctttcgttgagacttaccaagcagcaggtactttatctagagatttagaggatcagtattttggaaggataggtctatttagaaaccaaccaggagatttactattagaacaagctgatgttgtacttactatcggttatgatcctatagagtatgacccaaagttttggaacataaatggggatagaacaattatacatctagacgagataatcgccgacatcgatcacgcttatcaaccagatttagaactaatcggagatatcccgtcaacaatcaatcatattgaacatgatgctgtaaaggttgagttcgctgaacgtgagcagaaaatcttatctgatctaaagcaatatatgcatgagggtgaacaagttccagcagactggaaatctgaccgtgcacatcctttggaaatcgttaaggaactaagaaatgcggtcgatgatcatgtgactgttacatgtgatatcggttcacatgcaatttggatgtcacgttattttaggagctacgaaccattaactttaatgatatctaacgggatgcaaactctgggggttgcacttccttgggctattggcgctagtttagttaagcccggtgagaaggtggtatcggtatcaggtgatggtggctttctgttttcggctatggaattagaaactgcagtccgtttaaaagctcccattgtgcatattgtctggaatgattctacttacgacatggttgcttttcaacagttgaagaaatacaatagaacttcggctgtagactttggtaacatcgatattgtgaaatatgctgagtcttttggcgcaacaggcctgagggtggaaagtccagatcagttagctgatgtgttgagacaagggatgaatgccgagggaccggtaatcatagatgtgccagttgactactcagacaatattaatttggcttctgataaacttcctaaagagtttggcgagctaatgaagaccaaagccttataaggatccataaaaaacacgctttttcagttcgagtttatcattatcaatactgccatttcaaagaatacgtaaataattaatagtagtgattttcctaactttatttagtcaaaaaattagccttttaattctgctgtaacccgtacatgcccaaaatagggggcgggttacacagaatatataacatcgtaggtgtctgggtgaacagtttattcctggcatccactaaatataatggagcccgctttttaagctggcatccagaaaaaaaaagaatcccagcaccaaaatattgttttcttcaccaaccatcagttcataggtccattctcttagcgcaactacagagaacaggggcacaaacaggcaaaaaacgggcacaacctcaatggagtgatgcaacctgcctggagtaaatgatgacacaaggcaattgacccacgcatgtatctatctcattttcttacaccttctattaccttctgctctctctgatttggaaaaagctgaaaaaaaaggttgaaaccagttccctgaaattattcccctacttgactaataagtatataaagacggtaggtattgattgtaattctgtaaatctatttcttaaacttcttaaattctacttttatagttagtcttttttttagttttaaaacaccaagaacttagtttcgaataaacacacataaacaaacaaaaagcttatgtatactgttggagattatttgttagatagattgcatgaactaggcattgaagaaattttcggagttcccggggattacaatctgcaatttctagaccagattatttcacataaagacatgaaatgggtcggaaatgcaaatgagttaaatgcatcttacatggccgatggttatgccagaaccaaaaaggcggctgctttcttgactaccttcggggtgggtgaattatcggcagttaatggcttggctggatcatacgcagaaaacttgcctgtcgttgaaatcgttggctcgccaacatcaaaagttcaaaatgaaggaaaattcgtccaccacactttggcagatggtgacttcaagcacttcatgaaaatgcatgaacctgtaacggctgccagaactctactaactgctgagaatgcaactgtagagattgatcgtgtcttgagcgctcttttaaaggaaagaaagccagtctatattaacctgccagtagacgtcgcagcggccaaagcagagaagcctagcttaccacttaaaaaggaaaatagtacctcaaacacttcagatcaagagattcttaacaagatccaggaatctttgaaaaacgctaaaaagcccattgttataactggccatgagatcatatcatttggtttggagaaaacagtgacccagttcattagtaagacgaaactgccaataaccactctaaatttcggtaagtcctccgttgatgaagcgttgcctagcttcttgggtatttacaacggcaccttgtcagaacccaatctgaaagaatttgttgaatctgcagactttatattgatgttgggagtaaagttgactgacagctctactggtgcttttacacaccatctgaatgaaaacaagatgatatctcttaatatcgatgaaggtaagatattcaatgaaagaatacagaacttcgacttcgagagtctaatttcttccttactggacttaagtgaaatcgagtataaaggtaagtacattgacaaaaagcaggaagattttgttccgagcaacgcgctacttagtcaagatagattatggcaagctgttgaaaatctgacacaatccaatgagacaattgttgccgaacaaggtacctccttttttggcgcttcttccatcttcctaaagtccaagtctcatttcatagggcagccattgtggggtagcatcggttacacctttcctgctgctctagggtcccaaattgctgataaagaaagtagacatttgttgtttataggagacggatctttacaattgacagttcaagagttaggtttagccatcagagagaagattaatcctatctgcttcataataaacaacgatggctatacagttgagagggaaattcatggacctaatcaatcttataatgatataccaatgtggaattatagcaagttacctgaatcttttggggctaccgaggatcgtgttgtttctaagattgtaagaaccgaaaatgaatttgtttctgttatgaaggaagcacaagcggaccctaacaggatgtactggattgagttaattcttgctaaggagggtgcgccaaaggttctaaagaagatgggtaagttgttcgccgaacaaaacaaatccgtgacacatggttataatgtgcagcgatacaatcagttacgtaaaaattttggattttatagagcatattcttcactaagaggttgtaagagcgttttcagacgtatataggctaggtcatgtaattagttatgtcacgcttacattcacgccctccccccacatccgctctaaccgaaaaggaaggagttagacaacctgaagtctaggtccctatttatttttttatagttatgttagtattaagaacgttatttatatttcaaatttttcttttttttctgtacagacgcgtgtacgcatgtaacattatactgaaaaccttgcttgagaaggttttgggacgctcgaaggctttaatttgcgggtgtacaatatggacttcctcttttctggcaaccaaacccatacatcgggattcctataataccttcgttggtctccctaacatgtaggtggcggaggggagatatacaatagaacagataccagacaagacataatgggctaaacaagactacaccaattacactgcctcattgatggtggtacataacgaactaatactgtagccctagacttgatagccatcatcatatcgaagtttcactaccctttttccatttgccatctattgaagtaataataggcgcatgcaacttcttttctttttttttcttttctctctcccccgttgttgtctcaccatatccgcaatgacaaaaaaatgatggaagacactaaaggaaaaaattaacgacaaagacagcaccaacagatgtcgttgttccagagctgatgaggggtatctcgaagcacacgaaactttttccttccttcattcacgcacactactctctaatgagcaacggtatacggccttccttccagttacttgaatttgaaataaaaaaaagtttgctgtcttgctatcaagtataaatagacctgcaattattaatcttttgtttcctcgtcattgttctcgttccctttcttccttgtttctttttctgcacaatatttcaagctataccaagcatacaatcaactatctcatatacacatatgttgagaacgtcaacattgttcaccaggcgtgtccaaccaagcctattttctagaaacattcttagattgcaatccacagctgcattatatccagagaaattccaaggcattggtatctccaacgcaaaggattggaagcatcctaaacttgttagtttcgaccccaaacctttcggtgaccatgacgttgatgttgagattgaagcatgtggaatatgtgggagcgattttcatattgcagtaggcaattggggccctgttccggaaaatcaaattttgggtcacgaaattattggtagggtagtgaaggtgggttcaaaatgtcacacgggtgttaagattggtgatagggttggtgtaggtgcccaagcattggcttgtttcgaatgcgaaagatgcaaaagtgataacgaacaatactgtaccaacgatcatgttctaacaatgtggactccttacaaagatggatacatatctcaaggtggatttgcatcacatgttagattgcatgagcattttgcaattcaaattccggagaatatcccatcacctttggctgcaccattattgtgtgggggaataacagtgtttagtcctttattgagaaacggttgtggacctggtaagcgtgtggggattgttggcataggtggtattggtcacatggggatattactagctaaggccatgggagccgaagtttatgcgttcagtagaggacactccaagcgtgaagacagtatgaagttaggggcggaccattatattgccatgttggaggataaaggctggaccgaacaatattcaaatgctcttgatctgttagttgtgtgtagttcttctcttagtaaagttaattttgactcgattgtgaaaataatgaagattggcggctccattgtttccattgctgctccagaagttaacgagaagctggtactaaaaccactgggtctgatgggggtatctatctcatcttctgctatcggttcaagaaaagaaatagaacagctattaaagctagtcagcgagaaaaatgtgaagatttgggtagagaagctacccataagcgaggagggtgtatctcacgcatttacgagaatggaatccggagatgttaagtacaggtttacacttgtagactatgacaagaaattccataagtgagcggccgcataacaatactgacagtactaaataattgcctacttggcttcacatacgttgcatacgtcgatatagataataatgataatgacagcaggattatcgtaatacgtaatagttgaaaatctcaaaaatgtgtgggtcattacgtaaataatgataggaatgggattcttctatttttcctttttccattctagcagccgtcgggaaaacgtggcatcctctctttcgggctcaattggagtcacgctgccgtgagcatcctctctttccatatctaacaactgagcacgtaaccaatggaaaagcatgagcttagcgttgctccaaaaaagtattggatggttaataccatttgtctgttctcttctgactttgactcctcaaaaaaaaaaaatctacaatcaacagatcgcttcaattacgccctcacaaaaacttttttccttcttcttcgcccacgttaaattttatccctcatgttgtctaacggatttctgcacttgatttattataaaaagacaaagacataatacttctctatcaatttcagttattgttcttccttgcgttattcttctgttcttctttttcttttgtcatatataaccataaccaagtaatacatattcaaactcgagatgtccaaagctacttataaagaaagggctgcaacccatccatccccagtggcagctaaactgtttaacataatgcacgaaaaacaaactaacttatgcgcatcattagatgtaagaactactaaagagctactggagttggttgaggctttaggtccaaaaatttgtttgttgaagacacatgttgacatattaacagatttttctatggagggtaccgttaagcctctgaaagcgttaagcgcgaaatataactttcttttatttgaagaccgtaagtttgctgatattggaaatactgttaagttgcaatatagcgcaggagtttatagaattgccgaatgggctgacattacgaatgcccacggtgttgtaggtcctggcattgtgtctggattgaaacaagcggcagaggaagtgactaaggaaccaagaggtttactaatgctggcggaattatcttgcaaaggctctctagccaccggtgaatatacaaaaggtactgtggatattgcaaagtctgataaggacttcgtaatcggttttattgcacaaagagatatgggaggtcgtgagaattcaaaatgaagtgaagttcctatactttctagagaataggaacttctatagtgagtcgaataagggcgacacaaaatttattctaaatgcataataaatactgataacatcttatagtttgtattatattttgtattatcgttgacatgtataattttgatatcaaaaactgattttccctttattattttcgagatttattttcttaattctctttaacaaactagaaatattgtatatacaaaaaatcataaataatagatgaatagtttaattataggtgttcatcaatcgaaaaagcaacgtatcttatttaaagtgcgttgcttttttctcatttataaggttaaataattctcatatatcaagcaaagtgacaggcgcccttaaatattctgacaaatgctctttccctaaactccccccataaaaaaacccgccgaagcgggtttttacgttatttgcggattaacgattactcgttatcagaaccgcccagggggcccgagcttaagactggccgtcgttttacaacacagaaagagtttgtagaaacgcaaaaaggccatccgtcaggggccttctgcttagtttgatgcctggcagttccctactctcgccttccgcttcctcgctcactgactcgctgcgctcggtcgttcggctgcggcgagcggtatcagctcactcaaaggcggtaatacggttatccacagaatcaggggataacgcaggaaagaacatgtgagcaaaaggccagcaaaaggccaggaaccgtaaaaaggccgcgttgctggcgtttttccataggctccgcccccctgacgagcatcacaaaaatcgacgctcaagtcagaggtggcgaaacccgacaggactataaagataccaggcgtttccccctggaagctccctcgtgcgctctcctgttccgaccctgccgcttaccggatacctgtccgcctttctcccttcgggaagcgtggcgctttctcatagctcacgctgtaggtatctcagttcggtgtaggtcgttcgctccaagctgggctgtgtgcacgaaccccccgttcagcccgaccgctgcgccttatccggtaactatcgtcttgagtccaacccggtaagacacgacttatcgccactggcagcagccactggtaacaggattagcagagcgaggtatgtaggcggtgctacagagttcttgaagtggtgggctaactacggctacactagaagaacagtatttggtatctgcgctctgctgaagccagttaccttcggaaaaagagttggtagctcttgatccggcaaacaaaccaccgctggtagcggtggtttttttgtttgcaagcagcagattacgcgcagaaaaaaaggatctcaagaagatcctttgatcttttctacggggtctgacgctcagtggaacgacgcgcgcgtaactcacgttaagggattttggtcatgagcttgcgccgtcccgtcaagtcagcgtaatgctctgcttt

SEQ ID NO: 45 - DNA, 11374 bp, Artificial Sequence
  Plasmid pGV7103
tagaaaaactcatcgagcatcaaatgaaactgcaatttattcatatcaggattatcaataccatatttttgaaaaagccgtttctgtaatgaaggagaaaactcaccgaggcagttccataggatggcaagatcctggtatcggtctgcgattccgactcgtccaacatcaatacaacctattaatttcccctcgtcaaaaataaggttatcaagtgagaaatcaccatgagtgacgactgaatccggtgagaatggcaaaagtttatgcatttctttccagacttgttcaacaggccagccattacgctcgtcatcaaaatcactcgcatcaaccaaaccgttattcattcgtgattgcgcctgagcgaggcgaaatacgcgatcgctgttaaaaggacaattacaaacaggaatcgagtgcaaccggcgcaggaacactgccagcgcatcaacaatattttcacctgaatcaggatattcttctaatacctggaacgctgtttttccggggatcgcagtggtgagtaaccatgcatcatcaggagtacggataaaatgcttgatggtcggaagtggcataaattccgtcagccagtttagtctgaccatctcatctgtaacatcattggcaacgctacctttgccatgtttcagaaacaactctggcgcatcgggcttcccatacaagcgatagattgtcgcacctgattgcccgacattatcgcgagcccatttatacccatataaatcagcatccatgttggaatttaatcgcggcctcgacgtttcccgttgaatatggctcatattcttcctttttcaatattattgaagcatttatcagggttattgtctcatgagcggatacatatttgaatgtatttagaaaaataaacaaataggggtcagtgttacaaccaattaaccaattctgaacattatcgcgagcccatttatacctgaatatggctcataacaccccttgtttgcctggcggcagtagcgcggtggtcccacctgaccccatgccgaactcagaagtgaaacgccgtagcgccgatggtagtgtggggactccccatgcgagagtagggaactgccaggcatcaaataaaacgaaaggctcagtcgaaagactgggcctttcgcccgggctaattagggggtgtcgcccttattcgactctatagtgaagttcctattctctagaaagtataggaacttctgaagtggggaagcaaggcagaaactaacttcttcttcatgtaataaacacaccccgcgtttatttacctatctctaaacttcaacaccttatatcataactaatatttcttgagataagcacactgcacccataccttccttaaaaacgtagcttccagtttttggtggttccggcttccttcccgattccgcccgctaaacgcatatttttgttgcctggtggcatttgcaaaatgcataacctatgcatttaaaagattatgtatgctcttctgacttttcgtgtgatgaggctcgtggaaaaaatgaataatttatgaatttgagaacaattttgtgttgttacggtattttactatggaataatcaatcaattgaggattttatgcaaatatcgtttgaatatttttccgaccctttgagtacttttcttcataattgcataatattgtccgctgcccctttttctgttagacggtgtcttgatctacttgctatcgttcaacaccaccttattttctaactattttttttttagctcatttgaatcagcttatggtgatggcacatttttgcataaacctagctgtcctcgttgaacataggaaaaaaaaatatataaacaaggctctttcactctccttgcaatcagatttgggtttgttccctttattttcatatttcttgtcatattcctttctcaattattattttctactcataacctcacgcaaaataacacagtcaaatcaatcaaagtcgagatgctttcactacgtcaatctataagatttttcaagccagccacaagaactttgtgtagctctagatatctgcttatgttgactaaagctacaaaagagcagaaatcattggtgaaaaataggggtgcagaacttgttgtggactgtttggtagaacagggcgtaacacatgtttttggtatcccaggtgcaaaaatcgacgccgtgtttgatgcattacaagacaagggtccagaaattattgttgctagacatgagcaaaatgccgcatttatggcgcaagctgtaggtaggcttacaggtaaacctggtgttgtcctagttacgtctggcccaggagcctccaatttagcaactggtctattgacagctaatactgagggagatcctgtagttgcgttagccggtaatgtaattagagctgataggcttaagagaactcaccagtctctagacaacgctgctttattccaaccgatcaccaagtactcagtagaggtacaagacgtaaagaatatacctgaagctgtgacaaacgcatttcgtatagcttctgctggtcaggctggtgccgcgtttgtttcttttcctcaagacgttgtcaatgaagtgaccaatactaaaaacgttagagcggttgcagcccctaaactaggtccagccgcagacgacgcaattagcgctgcaattgctaaaattcagacggcgaaactaccagtagtccttgtcggtatgaagggcggaagaccagaagcaataaaagctgttcgtaagttattgaagaaagtccaattacctttcgttgagacttaccaagcagcaggtactttatctagagatttagaggatcagtattttggaaggataggtctatttagaaaccaaccaggagatttactattagaacaagctgatgttgtacttactatcggttatgatcctatagagtatgacccaaagttttggaacataaatggggatagaacaattatacatctagacgagataatcgccgacatcgatcacgcttatcaaccagatttagaactaatcggagatatcccgtcaacaatcaatcatattgaacatgatgctgtaaaggttgagttcgctgaacgtgagcagaaaatcttatctgatctaaagcaatatatgcatgagggtgaacaagttccagcagactggaaatctgaccgtgcacatcctttggaaatcgttaaggaactaagaaatgcggtcgatgatcatgtgactgttacatgtgatatcggttcacatgcaatttggatgtcacgttattttaggagctacgaaccattaactttaatgatatctaacgggatgcaaactctgggggttgcacttccttgggctattggcgctagtttagttaagcccggtgagaaggtggtatcggtatcaggtgatggtggctttctgttttcggctatggaattagaaactgcagtccgtttaaaagctcccattgtgcatattgtctggaatgattctacttacgacatggttgcttttcaacagttgaagaaatacaatagaacttcggctgtagactttggtaacatcgatattgtgaaatatgctgagtcttttggcgcaacaggcctgagggtggaaagtccagatcagttagctgatgtgttgagacaagggatgaatgccgagggaccggtaatcatagatgtgccagttgactactcagacaatattaatttggcttctgataaacttcctaaagagtttggcgagctaatgaagaccaaagccttataaggatccataaaaaacacgctttttcagttcgagtttatcattatcaatactgccatttcaaagaatacgtaaataattaatagtagtgattttcctaactttatttagtcaaaaaattagccttttaattctgctgtaacccgtacatgcccaaaatagggggcgggttacacagaatatataacatcgtaggtgtctgggtgaacagtttattcctggcatccactaaatataatggagcccgctttttaagctggcatccagaaaaaaaaagaatcccagcaccaaaatattgttttcttcaccaaccatcagttcataggtccattctcttagcgcaactacagagaacaggggcacaaacaggcaaaaaacgggcacaacctcaatggagtgatgcaacctgcctggagtaaatgatgacacaaggcaattgacccacgcatgtatctatctcattttcttacaccttctattaccttctgctctctctgatttggaaaaagctgaaaaaaaaggttgaaaccagttccctgaaattattcccctacttgactaataagtatataaagacggtaggtattgattgtaattctgtaaatctatttcttaaacttcttaaattctacttttatagttagtcttttttttagttttaaaacaccaagaacttagtttcgaataaacacacataaacaaacaaaaagcttatggcacctgttacaattgaaaagttcgtaaatcaagaagaacgacaccttgtttccaaccgatcagcaacaattccgtttggtgaatacatatttaaaagattgttgtccatcgatacgaaatcagttttcggtgttcctggtgacttcaacttatctctattagaatatctctattcacctagtgttgaatcagctggcctaagatgggtcggcacgtgtaatgaactgaacgccgcttatgcggccgacggatattcccgttactctaataagattggctgtttaataaccacgtatggcgttggtgaattaagcgccttgaacggtatagccggttcgttcgctgaaaatgtcaaagttttgcacattgttggtgtggccaagtccatagattcgcgttcaagtaactttagtgatcggaacctacatcatttggtcccacagctacatgattcaaattttaaagggccaaatcataaagtatatcatgatatggtaaaagatagagtcgcttgctcggtagcctacttggaggatattgaaactgcatgtgaccaagtcgataatgttatccgcgatatttacaagtattctaaacctggttatatttttgttcctgcagattttgcggatatgtctgttacatgtgataatttggttaatgttccacgtatatctcaacaagattgtatagtatacccttctgaaaaccaattgtctgacataatcaacaagattactagttggatatattccagtaaaacacctgcgatccttggagacgtactgactgataggtatggtgtgagtaactttttgaacaagcttatctgcaaaactgggatttggaatttttccactgttatgggaaaatctgtaattgatgagtcaaacccaacttatatgggtcaatataatggtaaagaaggtttaaaacaagtctatgaacattttgaactgtgcgacttggtcttgcattttggagtcgacatcaatgaaattaataatgggcattatacttttacttataaaccaaatgctaaaatcattcaatttcatccgaattatattcgccttgtggacactaggcagggcaatgagcaaatgttcaaaggaatcaattttgcccctattttaaaagaactatacaagcgcattgacgtttctaaactttctttgcaatatgattcaaatgtaactcaatatacgaacgaaacaatgcggttagaagatcctaccaatggacaatcaagcattattacacaagttcacttacaaaagacgatgcctaaatttttgaaccctggtgatgttgtcgtttgtgaaacaggctcttttcaattctctgttcgtgatttcgcgtttccttcgcaattaaaatatatatcgcaaggatttttcctttccattggcatggcccttcctgccgccctaggtgttggaattgccatgcaagaccactcaaacgctcacatcaatggtggcaacgtaaaagaggactataagccaagattaattttgtttgaaggtgacggtgcagcacagatgacaatccaagaactgagcaccattctgaagtgcaatattccactagaagttatcatttggaacaataacggctacactattgaaagagccatcatgggccctaccaggtcgtataacgacgttatgtcttggaaatggaccaaactatttgaagcattcggagacttcgacggaaagtatactaatagcactctcattcaatgtccctctaaattagcactgaaattggaggagcttaagaattcaaacaaaagaagcgggatagaacttttagaagtcaaattaggcgaattggatttccccgaacagctaaagtgcatggttgaagcagcggcacttaaaagaaataaaaaagtgacacatggttataatgtgcagcgatacaatcagttacgtaaaaattttggattttatagagcatattcttcactaagaggttgtaagagcgttttcagacgtatataggctaggtcatgtaattagttatgtcacgcttacattcacgccctccccccacatccgctctaaccgaaaaggaaggagttagacaacctgaagtctaggtccctatttatttttttatagttatgttagtattaagaacgttatttatatttcaaatttttcttttttttctgtacagacgcgtgtacgcatgtaacattatactgaaaaccttgcttgagaaggttttgggacgctcgaaggctttaatttgcgggtgtacaatatggacttcctcttttctggcaaccaaacccatacatcgggattcctataataccttcgttggtctccctaacatgtaggtggcggaggggagatatacaatagaacagataccagacaagacataatgggctaaacaagactacaccaattacactgcctcattgatggtggtacataacgaactaatactgtagccctagacttgatagccatcatcatatcgaagtttcactaccctttttccatttgccatctattgaagtaataataggcgcatgcaacttcttttctttttttttcttttctctctcccccgttgttgtctcaccatatccgcaatgacaaaaaaatgatggaagacactaaaggaaaaaattaacgacaaagacagcaccaacagatgtcgttgttccagagctgatgaggggtatctcgaagcacacgaaactttttccttccttcattcacgcacactactctctaatgagcaacggtatacggccttccttccagttacttgaatttgaaataaaaaaaagtttgctgtcttgctatcaagtataaatagacctgcaattattaatcttttgtttcctcgtcattgttctcgttccctttcttccttgtttctttttctgcacaatatttcaagctataccaagcatacaatcaactatctcatatacacatatgttgagaacgtcaacattgttcaccaggcgtgtccaaccaagcctattttctagaaacattcttagattgcaatccacagctgcattatatccagagaaattccaaggcattggtatctccaacgcaaaggattggaagcatcctaaacttgttagtttcgaccccaaacctttcggtgaccatgacgttgatgttgagattgaagcatgtggaatatgtgggagcgattttcatattgcagtaggcaattggggccctgttccggaaaatcaaattttgggtcacgaaattattggtagggtagtgaaggtgggttcaaaatgtcacacgggtgttaagattggtgatagggttggtgtaggtgcccaagcattggcttgtttcgaatgcgaaagatgcaaaagtgataacgaacaatactgtaccaacgatcatgttctaacaatgtggactccttacaaagatggatacatatctcaaggtggatttgcatcacatgttagattgcatgagcattttgcaattcaaattccggagaatatcccatcacctttggctgcaccattattgtgtgggggaataacagtgtttagtcctttattgagaaacggttgtggacctggtaagcgtgtggggattgttggcataggtggtattggtcacatggggatattactagctaaggccatgggagccgaagtttatgcgttcagtagaggacactccaagcgtgaagacagtatgaagttaggggcggaccattatattgccatgttggaggataaaggctggaccgaacaatattcaaatgctcttgatctgttagttgtgtgtagttcttctcttagtaaagttaattttgactcgattgtgaaaataatgaagattggcggctccattgtttccattgctgctccagaagttaacgagaagctggtactaaaaccactgggtctgatgggggtatctatctcatcttctgctatcggttcaagaaaagaaatagaacagctattaaagctagtcagcgagaaaaatgtgaagatttgggtagagaagctacccataagcgaggagggtgtatctcacgcatttacgagaatggaatccggagatgttaagtacaggtttacacttgtagactatgacaagaaattccataagtgagcggccgcataacaatactgacagtactaaataattgcctacttggcttcacatacgttgcatacgtcgatatagataataatgataatgacagcaggattatcgtaatacgtaatagttgaaaatctcaaaaatgtgtgggtcattacgtaaataatgataggaatgggattcttctatttttcctttttccattctagcagccgtcgggaaaacgtggcatcctctctttcgggctcaattggagtcacgctgccgtgagcatcctctctttccatatctaacaactgagcacgtaaccaatggaaaagcatgagcttagcgttgctccaaaaaagtattggatggttaataccatttgtctgttctcttctgactttgactcctcaaaaaaaaaaaatctacaatcaacagatcgcttcaattacgccctcacaaaaacttttttccttcttcttcgcccacgttaaattttatccctcatgttgtctaacggatttctgcacttgatttattataaaaagacaaagacataatacttctctatcaatttcagttattgttcttccttgcgttattcttctgttcttctttttcttttgtcatatataaccataaccaagtaatacatattcaaactcgagatgtccaaagctacttataaagaaagggctgcaacccatccatccccagtggcagctaaactgtttaacataatgcacgaaaaacaaactaacttatgcgcatcattagatgtaagaactactaaagagctactggagttggttgaggctttaggtccaaaaatttgtttgttgaagacacatgttgacatattaacagatttttctatggagggtaccgttaagcctctgaaagcgttaagcgcgaaatataactttcttttatttgaagaccgtaagtttgctgatattggaaatactgttaagttgcaatatagcgcaggagtttatagaattgccgaatgggctgacattacgaatgcccacggtgttgtaggtcctggcattgtgtctggattgaaacaagcggcagaggaagtgactaaggaaccaagaggtttactaatgctggcggaattatcttgcaaaggctctctagccaccggtgaatatacaaaaggtactgtggatattgcaaagtctgataaggacttcgtaatcggttttattgcacaaagagatatgggaggtcgtgagaattcaaaatgaagtgaagttcctatactttctagagaataggaacttctatagtgagtcgaataagggcgacacaaaatttattctaaatgcataataaatactgataacatcttatagtttgtattatattttgtattatcgttgacatgtataattttgatatcaaaaactgattttccctttattattttcgagatttattttcttaattctctttaacaaactagaaatattgtatatacaaaaaatcataaataatagatgaatagtttaattataggtgttcatcaatcgaaaaagcaacgtatcttatttaaagtgcgttgcttttttctcatttataaggttaaataattctcatatatcaagcaaagtgacaggcgcccttaaatattctgacaaatgctctttccctaaactccccccataaaaaaacccgccgaagcgggtttttacgttatttgcggattaacgattactcgttatcagaaccgcccagggggcccgagcttaagactggccgtcgttttacaacacagaaagagtttgtagaaacgcaaaaaggccatccgtcaggggccttctgcttagtttgatgcctggcagttccctactctcgccttccgcttcctcgctcactgactcgctgcgctcggtcgttcggctgcggcgagcggtatcagctcactcaaaggcggtaatacggttatccacagaatcaggggataacgcaggaaagaacatgtgagcaaaaggccagcaaaaggccaggaaccgtaaaaaggccgcgttgctggcgtttttccataggctccgcccccctgacgagcatcacaaaaatcgacgctcaagtcagaggtggcgaaacccgacaggactataaagataccaggcgtttccccctggaagctccctcgtgcgctctcctgttccgaccctgccgcttaccggatacctgtccgcctttctcccttcgggaagcgtggcgctttctcatagctcacgctgtaggtatctcagttcggtgtaggtcgttcgctccaagctgggctgtgtgcacgaaccccccgttcagcccgaccgctgcgccttatccggtaactatcgtcttgagtccaacccggtaagacacgacttatcgccactggcagcagccactggtaacaggattagcagagcgaggtatgtaggcggtgctacagagttcttgaagtggtgggctaactacggctacactagaagaacagtatttggtatctgcgctctgctgaagccagttaccttcggaaaaagagttggtagctcttgatccggcaaacaaaccaccgctggtagcggtggtttttttgtttgcaagcagcagattacgcgcagaaaaaaaggatctcaagaagatcctttgatcttttctacggggtctgacgctcagtggaacgacgcgcgcgtaactcacgttaagggattttggtcatgagcttgcgccgtcccgtcaagtcagcgtaatgctctgcttt

SEQ ID NO: 46 - DNA, 11392 bp, Artificial Sequence
  Plasmid pGV7104
tagaaaaactcatcgagcatcaaatgaaactgcaatttattcatatcaggattatcaataccatatttttgaaaaagccgtttctgtaatgaaggagaaaactcaccgaggcagttccataggatggcaagatcctggtatcggtctgcgattccgactcgtccaacatcaatacaacctattaatttcccctcgtcaaaaataaggttatcaagtgagaaatcaccatgagtgacgactgaatccggtgagaatggcaaaagtttatgcatttctttccagacttgttcaacaggccagccattacgctcgtcatcaaaatcactcgcatcaaccaaaccgttattcattcgtgattgcgcctgagcgaggcgaaatacgcgatcgctgttaaaaggacaattacaaacaggaatcgagtgcaaccggcgcaggaacactgccagcgcatcaacaatattttcacctgaatcaggatattcttctaatacctggaacgctgtttttccggggatcgcagtggtgagtaaccatgcatcatcaggagtacggataaaatgcttgatggtcggaagtggcataaattccgtcagccagtttagtctgaccatctcatctgtaacatcattggcaacgctacctttgccatgtttcagaaacaactctggcgcatcgggcttcccatacaagcgatagattgtcgcacctgattgcccgacattatcgcgagcccatttatacccatataaatcagcatccatgttggaatttaatcgcggcctcgacgtttcccgttgaatatggctcatattcttcctttttcaatattattgaagcatttatcagggttattgtctcatgagcggatacatatttgaatgtatttagaaaaataaacaaataggggtcagtgttacaaccaattaaccaattctgaacattatcgcgagcccatttatacctgaatatggctcataacaccccttgtttgcctggcggcagtagcgcggtggtcccacctgaccccatgccgaactcagaagtgaaacgccgtagcgccgatggtagtgtggggactccccatgcgagagtagggaactgccaggcatcaaataaaacgaaaggctcagtcgaaagactgggcctttcgcccgggctaattagggggtgtcgcccttattcgactctatagtgaagttcctattctctagaaagtataggaacttctgaagtggggaagcaaggcagaaactaacttcttcttcatgtaataaacacaccccgcgtttatttacctatctctaaacttcaacaccttatatcataactaatatttcttgagataagcacactgcacccataccttccttaaaaacgtagcttccagtttttggtggttccggcttccttcccgattccgcccgctaaacgcatatttttgttgcctggtggcatttgcaaaatgcataacctatgcatttaaaagattatgtatgctcttctgacttttcgtgtgatgaggctcgtggaaaaaatgaataatttatgaatttgagaacaattttgtgttgttacggtattttactatggaataatcaatcaattgaggattttatgcaaatatcgtttgaatatttttccgaccctttgagtacttttcttcataattgcataatattgtccgctgcccctttttctgttagacggtgtcttgatctacttgctatcgttcaacaccaccttattttctaactattttttttttagctcatttgaatcagcttatggtgatggcacatttttgcataaacctagctgtcctcgttgaacataggaaaaaaaaatatataaacaaggctctttcactctccttgcaatcagatttgggtttgttccctttattttcatatttcttgtcatattcctttctcaattattattttctactcataacctcacgcaaaataacacagtcaaatcaatcaaagtcgagatgctttcactacgtcaatctataagatttttcaagccagccacaagaactttgtgtagctctagatatctgcttcagcaaaaacccgtggtgatgttgactaaagctacaaaagagcagaaatcattggtgaaaaataggggtgcagaacttgttgtggactgtttggtagaacagggcgtaacacatgtttttggtatcccaggtgcaaaaatcgacgccgtgtttgatgcattacaagacaagggtccagaaattattgttgctagacatgagcaaaatgccgcatttatggcgcaagctgtaggtaggcttacaggtaaacctggtgttgtcctagttacgtctggcccaggagcctccaatttagcaactggtctattgacagctaatactgagggagatcctgtagttgcgttagccggtaatgtaattagagctgataggcttaagagaactcaccagtctctagacaacgctgctttattccaaccgatcaccaagtactcagtagaggtacaagacgtaaagaatatacctgaagctgtgacaaacgcatttcgtatagcttctgctggtcaggctggtgccgcgtttgtttcttttcctcaagacgttgtcaatgaagtgaccaatactaaaaacgttagagcggttgcagcccctaaactaggtccagccgcagacgacgcaattagcgctgcaattgctaaaattcagacggcgaaactaccagtagtccttgtcggtatgaagggcggaagaccagaagcaataaaagctgttcgtaagttattgaagaaagtccaattacctttcgttgagacttaccaagcagcaggtactttatctagagatttagaggatcagtattttggaaggataggtctatttagaaaccaaccaggagatttactattagaacaagctgatgttgtacttactatcggttatgatcctatagagtatgacccaaagttttggaacataaatggggatagaacaattatacatctagacgagataatcgccgacatcgatcacgcttatcaaccagatttagaactaatcggagatatcccgtcaacaatcaatcatattgaacatgatgctgtaaaggttgagttcgctgaacgtgagcagaaaatcttatctgatctaaagcaatatatgcatgagggtgaacaagttccagcagactggaaatctgaccgtgcacatcctttggaaatcgttaaggaactaagaaatgcggtcgatgatcatgtgactgttacatgtgatatcggttcacatgcaatttggatgtcacgttattttaggagctacgaaccattaactttaatgatatctaacgggatgcaaactctgggggttgcacttccttgggctattggcgctagtttagttaagcccggtgagaaggtggtatcggtatcaggtgatggtggctttctgttttcggctatggaattagaaactgcagtccgtttaaaagctcccattgtgcatattgtctggaatgattctacttacgacatggttgcttttcaacagttgaagaaatacaatagaacttcggctgtagactttggtaacatcgatattgtgaaatatgctgagtcttttggcgcaacaggcctgagggtggaaagtccagatcagttagctgatgtgttgagacaagggatgaatgccgagggaccggtaatcatagatgtgccagttgactactcagacaatattaatttggcttctgataaacttcctaaagagtttggcgagctaatgaagaccaaagccttataaggatccataaaaaacacgctttttcagttcgagtttatcattatcaatactgccatttcaaagaatacgtaaataattaatagtagtgattttcctaactttatttagtcaaaaaattagccttttaattctgctgtaacccgtacatgcccaaaatagggggcgggttacacagaatatataacatcgtaggtgtctgggtgaacagtttattcctggcatccactaaatataatggagcccgctttttaagctggcatccagaaaaaaaaagaatcccagcaccaaaatattgttttcttcaccaaccatcagttcataggtccattctcttagcgcaactacagagaacaggggcacaaacaggcaaaaaacgggcacaacctcaatggagtgatgcaacctgcctggagtaaatgatgacacaaggcaattgacccacgcatgtatctatctcattttcttacaccttctattaccttctgctctctctgatttggaaaaagctgaaaaaaaaggttgaaaccagttccctgaaattattcccctacttgactaataagtatataaagacggtaggtattgattgtaattctgtaaatctatttcttaaacttcttaaattctacttttatagttagtcttttttttagttttaaaacaccaagaacttagtttcgaataaacacacataaacaaacaaaaagcttatggcacctgttacaattgaaaagttcgtaaatcaagaagaacgacaccttgtttccaaccgatcagcaacaattccgtttggtgaatacatatttaaaagattgttgtccatcgatacgaaatcagttttcggtgttcctggtgacttcaacttatctctattagaatatctctattcacctagtgttgaatcagctggcctaagatgggtcggcacgtgtaatgaactgaacgccgcttatgcggccgacggatattcccgttactctaataagattggctgtttaataaccacgtatggcgttggtgaattaagcgccttgaacggtatagccggttcgttcgctgaaaatgtcaaagttttgcacattgttggtgtggccaagtccatagattcgcgttcaagtaactttagtgatcggaacctacatcatttggtcccacagctacatgattcaaattttaaagggccaaatcataaagtatatcatgatatggtaaaagatagagtcgcttgctcggtagcctacttggaggatattgaaactgcatgtgaccaagtcgataatgttatccgcgatatttacaagtattctaaacctggttatatttttgttcctgcagattttgcggatatgtctgttacatgtgataatttggttaatgttccacgtatatctcaacaagattgtatagtatacccttctgaaaaccaattgtctgacataatcaacaagattactagttggatatattccagtaaaacacctgcgatccttggagacgtactgactgataggtatggtgtgagtaactttttgaacaagcttatctgcaaaactgggatttggaatttttccactgttatgggaaaatctgtaattgatgagtcaaacccaacttatatgggtcaatataatggtaaagaaggtttaaaacaagtctatgaacattttgaactgtgcgacttggtcttgcattttggagtcgacatcaatgaaattaataatgggcattatacttttacttataaaccaaatgctaaaatcattcaatttcatccgaattatattcgccttgtggacactaggcagggcaatgagcaaatgttcaaaggaatcaattttgcccctattttaaaagaactatacaagcgcattgacgtttctaaactttctttgcaatatgattcaaatgtaactcaatatacgaacgaaacaatgcggttagaagatcctaccaatggacaatcaagcattattacacaagttcacttacaaaagacgatgcctaaatttttgaaccctggtgatgttgtcgtttgtgaaacaggctcttttcaattctctgttcgtgatttcgcgtttccttcgcaattaaaatatatatcgcaaggatttttcctttccattggcatggcccttcctgccgccctaggtgttggaattgccatgcaagaccactcaaacgctcacatcaatggtggcaacgtaaaagaggactataagccaagattaattttgtttgaaggtgacggtgcagcacagatgacaatccaagaactgagcaccattctgaagtgcaatattccactagaagttatcatttggaacaataacggctacactattgaaagagccatcatgggccctaccaggtcgtataacgacgttatgtcttggaaatggaccaaactatttgaagcattcggagacttcgacggaaagtatactaatagcactctcattcaatgtccctctaaattagcactgaaattggaggagcttaagaattcaaacaaaagaagcgggatagaacttttagaagtcaaattaggcgaattggatttccccgaacagctaaagtgcatggttgaagcagcggcacttaaaagaaataaaaaagtgacacatggttataatgtgcagcgatacaatcagttacgtaaaaattttggattttatagagcatattcttcactaagaggttgtaagagcgttttcagacgtatataggctaggtcatgtaattagttatgtcacgcttacattcacgccctccccccacatccgctctaaccgaaaaggaaggagttagacaacctgaagtctaggtccctatttatttttttatagttatgttagtattaagaacgttatttatatttcaaatttttcttttttttctgtacagacgcgtgtacgcatgtaacattatactgaaaaccttgcttgagaaggttttgggacgctcgaaggctttaatttgcgggtgtacaatatggacttcctcttttctggcaaccaaacccatacatcgggattcctataataccttcgttggtctccctaacatgtaggtggcggaggggagatatacaatagaacagataccagacaagacataatgggctaaacaagactacaccaattacactgcctcattgatggtggtacataacgaactaatactgtagccctagacttgatagccatcatcatatcgaagtttcactaccctttttccatttgccatctattgaagtaataataggcgcatgcaacttcttttctttttttttcttttctctctcccccgttgttgtctcaccatatccgcaatgacaaaaaaatgatggaagacactaaaggaaaaaattaacgacaaagacagcaccaacagatgtcgttgttccagagctgatgaggggtatctcgaagcacacgaaactttttccttccttcattcacgcacactactctctaatgagcaacggtatacggccttccttccagttacttgaatttgaaataaaaaaaagtttgctgtcttgctatcaagtataaatagacctgcaattattaatcttttgtttcctcgtcattgttctcgttccctttcttccttgtttctttttctgcacaatatttcaagctataccaagcatacaatcaactatctcatatacacatatgttgagaacgtcaacattgttcaccaggcgtgtccaaccaagcctattttctagaaacattcttagattgcaatccacagctgcattatatccagagaaattccaaggcattggtatctccaacgcaaaggattggaagcatcctaaacttgttagtttcgaccccaaacctttcggtgaccatgacgttgatgttgagattgaagcatgtggaatatgtgggagcgattttcatattgcagtaggcaattggggccctgttccggaaaatcaaattttgggtcacgaaattattggtagggtagtgaaggtgggttcaaaatgtcacacgggtgttaagattggtgatagggttggtgtaggtgcccaagcattggcttgtttcgaatgcgaaagatgcaaaagtgataacgaacaatactgtaccaacgatcatgttctaacaatgtggactccttacaaagatggatacatatctcaaggtggatttgcatcacatgttagattgcatgagcattttgcaattcaaattccggagaatatcccatcacctttggctgcaccattattgtgtgggggaataacagtgtttagtcctttattgagaaacggttgtggacctggtaagcgtgtggggattgttggcataggtggtattggtcacatggggatattactagctaaggccatgggagccgaagtttatgcgttcagtagaggacactccaagcgtgaagacagtatgaagttaggggcggaccattatattgccatgttggaggataaaggctggaccgaacaatattcaaatgctcttgatctgttagttgtgtgtagttcttctcttagtaaagttaattttgactcgattgtgaaaataatgaagattggcggctccattgtttccattgctgctccagaagttaacgagaagctggtactaaaaccactgggtctgatgggggtatctatctcatcttctgctatcggttcaagaaaagaaatagaacagctattaaagctagtcagcgagaaaaatgtgaagatttgggtagagaagctacccataagcgaggagggtgtatctcacgcatttacgagaatggaatccggagatgttaagtacaggtttacacttgtagactatgacaagaaattccataagtgagcggccgcataacaatactgacagtactaaataattgcctacttggcttcacatacgttgcatacgtcgatatagataataatgataatgacagcaggattatcgtaatacgtaatagttgaaaatctcaaaaatgtgtgggtcattacgtaaataatgataggaatgggattcttctatttttcctttttccattctagcagccgtcgggaaaacgtggcatcctctctttcgggctcaattggagtcacgctgccgtgagcatcctctctttccatatctaacaactgagcacgtaaccaatggaaaagcatgagcttagcgttgctccaaaaaagtattggatggttaataccatttgtctgttctcttctgactttgactcctcaaaaaaaaaaaatctacaatcaacagatcgcttcaattacgccctcacaaaaacttttttccttcttcttcgcccacgttaaattttatccctcatgttgtctaacggatttctgcacttgatttattataaaaagacaaagacataatacttctctatcaatttcagttattgttcttccttgcgttattcttctgttcttctttttcttttgtcatatataaccataaccaagtaatacatattcaaactcgagatgtccaaagctacttataaagaaagggctgcaacccatccatccccagtggcagctaaactgtttaacataatgcacgaaaaacaaactaacttatgcgcatcattagatgtaagaactactaaagagctactggagttggttgaggctttaggtccaaaaatttgtttgttgaagacacatgttgacatattaacagatttttctatggagggtaccgttaagcctctgaaagcgttaagcgcgaaatataactttcttttatttgaagaccgtaagtttgctgatattggaaatactgttaagttgcaatatagcgcaggagtttatagaattgccgaatgggctgacattacgaatgcccacggtgttgtaggtcctggcattgtgtctggattgaaacaagcggcagaggaagtgactaaggaaccaagaggtttactaatgctggcggaattatcttgcaaaggctctctagccaccggtgaatatacaaaaggtactgtggatattgcaaagtctgataaggacttcgtaatcggttttattgcacaaagagatatgggaggtcgtgagaattcaaaatgaagtgaagttcctatactttctagagaataggaacttctatagtgagtcgaataagggcgacacaaaatttattctaaatgcataataaatactgataacatcttatagtttgtattatattttgtattatcgttgacatgtataattttgatatcaaaaactgattttccctttattattttcgagatttattttcttaattctctttaacaaactagaaatattgtatatacaaaaaatcataaataatagatgaatagtttaattataggtgttcatcaatcgaaaaagcaacgtatcttatttaaagtgcgttgcttttttctcatttataaggttaaataattctcatatatcaagcaaagtgacaggcgcccttaaatattctgacaaatgctctttccctaaactccccccataaaaaaacccgccgaagcgggtttttacgttatttgcggattaacgattactcgttatcagaaccgcccagggggcccgagcttaagactggccgtcgttttacaacacagaaagagtttgtagaaacgcaaaaaggccatccgtcaggggccttctgcttagtttgatgcctggcagttccctactctcgccttccgcttcctcgctcactgactcgctgcgctcggtcgttcggctgcggcgagcggtatcagctcactcaaaggcggtaatacggttatccacagaatcaggggataacgcaggaaagaacatgtgagcaaaaggccagcaaaaggccaggaaccgtaaaaaggccgcgttgctggcgtttttccataggctccgcccccctgacgagcatcacaaaaatcgacgctcaagtcagaggtggcgaaacccgacaggactataaagataccaggcgtttccccctggaagctccctcgtgcgctctcctgttccgaccctgccgcttaccggatacctgtccgcctttctcccttcgggaagcgtggcgctttctcatagctcacgctgtaggtatctcagttcggtgtaggtcgttcgctccaagctgggctgtgtgcacgaaccccccgttcagcccgaccgctgcgccttatccggtaactatcgtcttgagtccaacccggtaagacacgacttatcgccactggcagcagccactggtaacaggattagcagagcgaggtatgtaggcggtgctacagagttcttgaagtggtgggctaactacggctacactagaagaacagtatttggtatctgcgctctgctgaagccagttaccttcggaaaaagagttggtagctcttgatccggcaaacaaaccaccgctggtagcggtggtttttttgtttgcaagcagcagattacgcgcagaaaaaaaggatctcaagaagatcctttgatcttttctacggggtctgacgctcagtggaacgacgcgcgcgtaactcacgttaagggattttggtcatgagcttgcgccgtcccgtcaagtcagcgtaatgctctgcttt

SEQ ID NO: 47 - DNA, 11386 bp, Artificial Sequence
  Plasmid pGV7105
tagaaaaactcatcgagcatcaaatgaaactgcaatttattcatatcaggattatcaataccatatttttgaaaaagccgtttctgtaatgaaggagaaaactcaccgaggcagttccataggatggcaagatcctggtatcggtctgcgattccgactcgtccaacatcaatacaacctattaatttcccctcgtcaaaaataaggttatcaagtgagaaatcaccatgagtgacgactgaatccggtgagaatggcaaaagtttatgcatttctttccagacttgttcaacaggccagccattacgctcgtcatcaaaatcactcgcatcaaccaaaccgttattcattcgtgattgcgcctgagcgaggcgaaatacgcgatcgctgttaaaaggacaattacaaacaggaatcgagtgcaaccggcgcaggaacactgccagcgcatcaacaatattttcacctgaatcaggatattcttctaatacctggaacgctgtttttccggggatcgcagtggtgagtaaccatgcatcatcaggagtacggataaaatgcttgatggtcggaagtggcataaattccgtcagccagtttagtctgaccatctcatctgtaacatcattggcaacgctacctttgccatgtttcagaaacaactctggcgcatcgggcttcccatacaagcgatagattgtcgcacctgattgcccgacattatcgcgagcccatttatacccatataaatcagcatccatgttggaatttaatcgcggcctcgacgtttcccgttgaatatggctcatattcttcctttttcaatattattgaagcatttatcagggttattgtctcatgagcggatacatatttgaatgtatttagaaaaataaacaaataggggtcagtgttacaaccaattaaccaattctgaacattatcgcgagcccatttatacctgaatatggctcataacaccccttgtttgcctggcggcagtagcgcggtggtcccacctgaccccatgccgaactcagaagtgaaacgccgtagcgccgatggtagtgtggggactccccatgcgagagtagggaactgccaggcatcaaataaaacgaaaggctcagtcgaaagactgggcctttcgcccgggctaattagggggtgtcgcccttattcgactctatagtgaagttcctattctctagaaagtataggaacttctgaagtggggaagcaaggcagaaactaacttcttcttcatgtaataaacacaccccgcgtttatttacctatctctaaacttcaacaccttatatcataactaatatttcttgagataagcacactgcacccataccttccttaaaaacgtagcttccagtttttggtggttccggcttccttcccgattccgcccgctaaacgcatatttttgttgcctggtggcatttgcaaaatgcataacctatgcatttaaaagattatgtatgctcttctgacttttcgtgtgatgaggctcgtggaaaaaatgaataatttatgaatttgagaacaattttgtgttgttacggtattttactatggaataatcaatcaattgaggattttatgcaaatatcgtttgaatatttttccgaccctttgagtacttttcttcataattgcataatattgtccgctgcccctttttctgttagacggtgtcttgatctacttgctatcgttcaacaccaccttattttctaactattttttttttagctcatttgaatcagcttatggtgatggcacatttttgcataaacctagctgtcctcgttgaacataggaaaaaaaaatatataaacaaggctctttcactctccttgcaatcagatttgggtttgttccctttattttcatatttcttgtcatattcctttctcaattattattttctactcataacctcacgcaaaataacacagtcaaatcaatcaaagtcgagatgatcagacaatctacgctaaaaaacttcgctattaagcgttgctttcaacatatagcataccgcaacacacctgccatgagatcagtagctctcgcgcagcgcttttatagttcgtcttcccgttattacagtgcgtctccattaccagcctctaaaaggccagagcctgctccaagtttcaatgttgatccattagaacagcccgctgaaccttcaaaattggctaagaaactacgcgctgagcctgacatggatacctctttcgtcggtttaactggtggtcaaatatttaacgaaatgatgtccagacaaaacgttgatactgtatttggttatccaggtggtgctatcctacctgtttacgatgccattcataacagtgataaattcaacttcgttcttccaaaacacgaacaaggtgccggtcacatggcagaaggctacgccagagcttctggtaaaccaggtgttgtcttggttacttctgggccaggtgccaccaatgtcgttactccaatggcagatgcctttgcagacgggattccaatggttgtctttacagggcaagtcccaactagtgctatcggtactgatgctttccaagaggctgacgtcgttggtatttctagatcttgtacgaaatggaatgtcatggtcaagtccgtggaagaattgccattgcgtattaacgaggcttttgaaattgccacgagcggtagaccgggaccagtcttggtcgatttaccaaaggatgttacagcagctatcttaagaaatccaattccaacaaaaacaactcttccatcaaacgcactaaaccaattaaccagtcgcgcacaagatgaatttgtcatgcaaagtatcaataaagcagcagatttgatcaacttggcaaagaaacctgtcttatacgtcggtgctggtattttaaaccatgcagatggtccaagattactaaaagaattaagtgaccgtgctcaaatacctgtcaccactactttacaaggtttaggttcattcgaccaagaagatccaaaatcattggatatgcttggtatgcacggttgtgctactgccaacctggcagtgcaaaatgccgacttgataattgcagttggtgctagattcgacgaccgtgtcactggtaatatttctaaattcgctccagaagctcgtcgtgcagctgccgagggtagaggtggtattattcatttcgaggttagtccaaaaaacataaacaaggttgttcaaactcaaatagcagtggaaggtgatgctacgaccaatctgggcaaaatgatgtcaaagattttcccagttaaggagaggtctgaatggtttgctcaaataaataaatggaagaaggaatacccatacgcttatatggaggagactccaggatctaaaattaaaccacagacggttataaagaaactatccaaggttgccaacgacacaggaagacatgtcattgttacaacgggtgtggggcaacatcaaatgtgggctgctcaacactggacatggagaaatccacatactttcatcacatcaggtggtttaggtacgatgggttacggtctccctgccgccatcggtgctcaagttgcaaagccagaatctttggttattgacattgatggtgacgcatcctttaacatgactctaacggaattgagttctgccgttcaagctggtactccagtgaagattttgattttgaacaatgaagagcaaggtatggttactcaatggcaatccctgttctacgaacatcgttattcccacacacatcaattgaaccctgatttcataaaactagcggaggctatgggtttaaaaggtttaagagtcaagaagcaagaggaattggacgctaagttgaaagaattcgtttctaccaagggcccagttttgcttgaagtggaagttgataaaaaagttcctgttttgccaatggtggcaggtggtagcggtctagacgagttcataaattttgacccagaagttgaaagacaacagactgaattacgtcataagcgtacaggcggtaagcactgaggatccataaaaaacacgctttttcagttcgagtttatcattatcaatactgccatttcaaagaatacgtaaataattaatagtagtgattttcctaactttatttagtcaaaaaattagccttttaattctgctgtaacccgtacatgcccaaaatagggggcgggttacacagaatatataacatcgtaggtgtctgggtgaacagtttattcctggcatccactaaatataatggagcccgctttttaagctggcatccagaaaaaaaaagaatcccagcaccaaaatattgttttcttcaccaaccatcagttcataggtccattctcttagcgcaactacagagaacaggggcacaaacaggcaaaaaacgggcacaacctcaatggagtgatgcaacctgcctggagtaaatgatgacacaaggcaattgacccacgcatgtatctatctcattttcttacaccttctattaccttctgctctctctgatttggaaaaagctgaaaaaaaaggttgaaaccagttccctgaaattattcccctacttgactaataagtatataaagacggtaggtattgattgtaattctgtaaatctatttcttaaacttcttaaattctacttttatagttagtcttttttttagttttaaaacaccaagaacttagtttcgaataaacacacataaacaaacaaaaagcttatgtatactgttggagattatttgttagatagattgcatgaactaggcattgaagaaattttcggagttcccggggattacaatctgcaatttctagaccagattatttcacataaagacatgaaatgggtcggaaatgcaaatgagttaaatgcatcttacatggccgatggttatgccagaaccaaaaaggcggctgctttcttgactaccttcggggtgggtgaattatcggcagttaatggcttggctggatcatacgcagaaaacttgcctgtcgttgaaatcgttggctcgccaacatcaaaagttcaaaatgaaggaaaattcgtccaccacactttggcagatggtgacttcaagcacttcatgaaaatgcatgaacctgtaacggctgccagaactctactaactgctgagaatgcaactgtagagattgatcgtgtcttgagcgctcttttaaaggaaagaaagccagtctatattaacctgccagtagacgtcgcagcggccaaagcagagaagcctagcttaccacttaaaaaggaaaatagtacctcaaacacttcagatcaagagattcttaacaagatccaggaatctttgaaaaacgctaaaaagcccattgttataactggccatgagatcatatcatttggtttggagaaaacagtgacccagttcattagtaagacgaaactgccaataaccactctaaatttcggtaagtcctccgttgatgaagcgttgcctagcttcttgggtatttacaacggcaccttgtcagaacccaatctgaaagaatttgttgaatctgcagactttatattgatgttgggagtaaagttgactgacagctctactggtgcttttacacaccatctgaatgaaaacaagatgatatctcttaatatcgatgaaggtaagatattcaatgaaagaatacagaacttcgacttcgagagtctaatttcttccttactggacttaagtgaaatcgagtataaaggtaagtacattgacaaaaagcaggaagattttgttccgagcaacgcgctacttagtcaagatagattatggcaagctgttgaaaatctgacacaatccaatgagacaattgttgccgaacaaggtacctccttttttggcgcttcttccatcttcctaaagtccaagtctcatttcatagggcagccattgtggggtagcatcggttacacctttcctgctgctctagggtcccaaattgctgataaagaaagtagacatttgttgtttataggagacggatctttacaattgacagttcaagagttaggtttagccatcagagagaagattaatcctatctgcttcataataaacaacgatggctatacagttgagagggaaattcatggacctaatcaatcttataatgatataccaatgtggaattatagcaagttacctgaatcttttggggctaccgaggatcgtgttgtttctaagattgtaagaaccgaaaatgaatttgtttctgttatgaaggaagcacaagcggaccctaacaggatgtactggattgagttaattcttgctaaggagggtgcgccaaaggttctaaagaagatgggtaagttgttcgccgaacaaaacaaatccgtgacacatggttataatgtgcagcgatacaatcagttacgtaaaaattttggattttatagagcatattcttcactaagaggttgtaagagcgttttcagacgtatataggctaggtcatgtaattagttatgtcacgcttacattcacgccctccccccacatccgctctaaccgaaaaggaaggagttagacaacctgaagtctaggtccctatttatttttttatagttatgttagtattaagaacgttatttatatttcaaatttttcttttttttctgtacagacgcgtgtacgcatgtaacattatactgaaaaccttgcttgagaaggttttgggacgctcgaaggctttaatttgcgggtgtacaatatggacttcctcttttctggcaaccaaacccatacatcgggattcctataataccttcgttggtctccctaacatgtaggtggcggaggggagatatacaatagaacagataccagacaagacataatgggctaaacaagactacaccaattacactgcctcattgatggtggtacataacgaactaatactgtagccctagacttgatagccatcatcatatcgaagtttcactaccctttttccatttgccatctattgaagtaataataggcgcatgcaacttcttttctttttttttcttttctctctcccccgttgttgtctcaccatatccgcaatgacaaaaaaatgatggaagacactaaaggaaaaaattaacgacaaagacagcaccaacagatgtcgttgttccagagctgatgaggggtatctcgaagcacacgaaactttttccttccttcattcacgcacactactctctaatgagcaacggtatacggccttccttccagttacttgaatttgaaataaaaaaaagtttgctgtcttgctatcaagtataaatagacctgcaattattaatcttttgtttcctcgtcattgttctcgttccctttcttccttgtttctttttctgcacaatatttcaagctataccaagcatacaatcaactatctcatatacacatatgttgagaacgtcaacattgttcaccaggcgtgtccaaccaagcctattttctagaaacattcttagattgcaatccacagctgcattatatccagagaaattccaaggcattggtatctccaacgcaaaggattggaagcatcctaaacttgttagtttcgaccccaaacctttcggtgaccatgacgttgatgttgagattgaagcatgtggaatatgtgggagcgattttcatattgcagtaggcaattggggccctgttccggaaaatcaaattttgggtcacgaaattattggtagggtagtgaaggtgggttcaaaatgtcacacgggtgttaagattggtgatagggttggtgtaggtgcccaagcattggcttgtttcgaatgcgaaagatgcaaaagtgataacgaacaatactgtaccaacgatcatgttctaacaatgtggactccttacaaagatggatacatatctcaaggtggatttgcatcacatgttagattgcatgagcattttgcaattcaaattccggagaatatcccatcacctttggctgcaccattattgtgtgggggaataacagtgtttagtcctttattgagaaacggttgtggacctggtaagcgtgtggggattgttggcataggtggtattggtcacatggggatattactagctaaggccatgggagccgaagtttatgcgttcagtagaggacactccaagcgtgaagacagtatgaagttaggggcggaccattatattgccatgttggaggataaaggctggaccgaacaatattcaaatgctcttgatctgttagttgtgtgtagttcttctcttagtaaagttaattttgactcgattgtgaaaataatgaagattggcggctccattgtttccattgctgctccagaagttaacgagaagctggtactaaaaccactgggtctgatgggggtatctatctcatcttctgctatcggttcaagaaaagaaatagaacagctattaaagctagtcagcgagaaaaatgtgaagatttgggtagagaagctacccataagcgaggagggtgtatctcacgcatttacgagaatggaatccggagatgttaagtacaggtttacacttgtagactatgacaagaaattccataagtgagcggccgcataacaatactgacagtactaaataattgcctacttggcttcacatacgttgcatacgtcgatatagataataatgataatgacagcaggattatcgtaatacgtaatagttgaaaatctcaaaaatgtgtgggtcattacgtaaataatgataggaatgggattcttctatttttcctttttccattctagcagccgtcgggaaaacgtggcatcctctctttcgggctcaattggagtcacgctgccgtgagcatcctctctttccatatctaacaactgagcacgtaaccaatggaaaagcatgagcttagcgttgctccaaaaaagtattggatggttaataccatttgtctgttctcttctgactttgactcctcaaaaaaaaaaaatctacaatcaacagatcgcttcaattacgccctcacaaaaacttttttccttcttcttcgcccacgttaaattttatccctcatgttgtctaacggatttctgcacttgatttattataaaaagacaaagacataatacttctctatcaatttcagttattgttcttccttgcgttattcttctgttcttctttttcttttgtcatatataaccataaccaagtaatacatattcaaactcgagatgtccaaagctacttataaagaaagggctgcaacccatccatccccagtggcagctaaactgtttaacataatgcacgaaaaacaaactaacttatgcgcatcattagatgtaagaactactaaagagctactggagttggttgaggctttaggtccaaaaatttgtttgttgaagacacatgttgacatattaacagatttttctatggagggtaccgttaagcctctgaaagcgttaagcgcgaaatataactttcttttatttgaagaccgtaagtttgctgatattggaaatactgttaagttgcaatatagcgcaggagtttatagaattgccgaatgggctgacattacgaatgcccacggtgttgtaggtcctggcattgtgtctggattgaaacaagcggcagaggaagtgactaaggaaccaagaggtttactaatgctggcggaattatcttgcaaaggctctctagccaccggtgaatatacaaaaggtactgtggatattgcaaagtctgataaggacttcgtaatcggttttattgcacaaagagatatgggaggtcgtgagaattcaaaatgaagtgaagttcctatactttctagagaataggaacttctatagtgagtcgaataagggcgacacaaaatttattctaaatgcataataaatactgataacatcttatagtttgtattatattttgtattatcgttgacatgtataattttgatatcaaaaactgattttccctttattattttcgagatttattttcttaattctctttaacaaactagaaatattgtatatacaaaaaatcataaataatagatgaatagtttaattataggtgttcatcaatcgaaaaagcaacgtatcttatttaaagtgcgttgcttttttctcatttataaggttaaataattctcatatatcaagcaaagtgacaggcgcccttaaatattctgacaaatgctctttccctaaactccccccataaaaaaacccgccgaagcgggtttttacgttatttgcggattaacgattactcgttatcagaaccgcccagggggcccgagcttaagactggccgtcgttttacaacacagaaagagtttgtagaaacgcaaaaaggccatccgtcaggggccttctgcttagtttgatgcctggcagttccctactctcgccttccgcttcctcgctcactgactcgctgcgctcggtcgttcggctgcggcgagcggtatcagctcactcaaaggcggtaatacggttatccacagaatcaggggataacgcaggaaagaacatgtgagcaaaaggccagcaaaaggccaggaaccgtaaaaaggccgcgttgctggcgtttttccataggctccgcccccctgacgagcatcacaaaaatcgacgctcaagtcagaggtggcgaaacccgacaggactataaagataccaggcgtttccccctggaagctccctcgtgcgctctcctgttccgaccctgccgcttaccggatacctgtccgcctttctcccttcgggaagcgtggcgctttctcatagctcacgctgtaggtatctcagttcggtgtaggtcgttcgctccaagctgggctgtgtgcacgaaccccccgttcagcccgaccgctgcgccttatccggtaactatcgtcttgagtccaacccggtaagacacgacttatcgccactggcagcagccactggtaacaggattagcagagcgaggtatgtaggcggtgctacagagttcttgaagtggtgggctaactacggctacactagaagaacagtatttggtatctgcgctctgctgaagccagttaccttcggaaaaagagttggtagctcttgatccggcaaacaaaccaccgctggtagcggtggtttttttgtttgcaagcagcagattacgcgcagaaaaaaaggatctcaagaagatcctttgatcttttctacggggtctgacgctcagtggaacgacgcgcgcgtaactcacgttaagggattttggtcatgagcttgcgccgtcccgtcaagtcagcgtaatgctctgcttt

SEQ ID NO: 48 - DNA, 11647 bp, Artificial Sequence
  Plasmid pGV7106
tagaaaaactcatcgagcatcaaatgaaactgcaatttattcatatcaggattatcaataccatatttttgaaaaagccgtttctgtaatgaaggagaaaactcaccgaggcagttccataggatggcaagatcctggtatcggtctgcgattccgactcgtccaacatcaatacaacctattaatttcccctcgtcaaaaataaggttatcaagtgagaaatcaccatgagtgacgactgaatccggtgagaatggcaaaagtttatgcatttctttccagacttgttcaacaggccagccattacgctcgtcatcaaaatcactcgcatcaaccaaaccgttattcattcgtgattgcgcctgagcgaggcgaaatacgcgatcgctgttaaaaggacaattacaaacaggaatcgagtgcaaccggcgcaggaacactgccagcgcatcaacaatattttcacctgaatcaggatattcttctaatacctggaacgctgtttttccggggatcgcagtggtgagtaaccatgcatcatcaggagtacggataaaatgcttgatggtcggaagtggcataaattccgtcagccagtttagtctgaccatctcatctgtaacatcattggcaacgctacctttgccatgtttcagaaacaactctggcgcatcgggcttcccatacaagcgatagattgtcgcacctgattgcccgacattatcgcgagcccatttatacccatataaatcagcatccatgttggaatttaatcgcggcctcgacgtttcccgttgaatatggctcatattcttcctttttcaatattattgaagcatttatcagggttattgtctcatgagcggatacatatttgaatgtatttagaaaaataaacaaataggggtcagtgttacaaccaattaaccaattctgaacattatcgcgagcccatttatacctgaatatggctcataacaccccttgtttgcctggcggcagtagcgcggtggtcccacctgaccccatgccgaactcagaagtgaaacgccgtagcgccgatggtagtgtggggactccccatgcgagagtagggaactgccaggcatcaaataaaacgaaaggctcagtcgaaagactgggcctttcgcccgggctaattagggggtgtcgcccttattcgactctatagtgaagttcctattctctagaaagtataggaacttctgaagtggggaagcaaggcagaaactaacttcttcttcatgtaataaacacaccccgcgtttatttacctatctctaaacttcaacaccttatatcataactaatatttcttgagataagcacactgcacccataccttccttaaaaacgtagcttccagtttttggtggttccggcttccttcccgattccgcccgctaaacgcatatttttgttgcctggtggcatttgcaaaatgcataacctatgcatttaaaagattatgtatgctcttctgacttttcgtgtgatgaggctcgtggaaaaaatgaataatttatgaatttgagaacaattttgtgttgttacggtattttactatggaataatcaatcaattgaggattttatgcaaatatcgtttgaatatttttccgaccctttgagtacttttcttcataattgcataatattgtccgctgcccctttttctgttagacggtgtcttgatctacttgctatcgttcaacaccaccttattttctaactattttttttttagctcatttgaatcagcttatggtgatggcacatttttgcataaacctagctgtcctcgttgaacataggaaaaaaaaatatataaacaaggctctttcactctccttgcaatcagatttgggtttgttccctttattttcatatttcttgtcatattcctttctcaattattattttctactcataacctcacgcaaaataacacagtcaaatcaatcaaagtcgagatgatcagacaatctacgctaaaaaacttcgctattaagcgttgctttcaacatatagcataccgcaacacacctgccatgagatcagtagctctcgcgcagcgcttttatagttcgtcttcccgttattacagtgcgtctccattaccagcctctaaaaggccagagcctgctccaagtttcaatgttgatccattagaacagcccgctgaaccttcaaaattggctaagaaactacgcgctgagcctgacatggatacctctttcgtcggtttaactggtggtcaaatatttaacgaaatgatgtccagacaaaacgttgatactgtatttggttatccaggtggtgctatcctacctgtttacgatgccattcataacagtgataaattcaacttcgttcttccaaaacacgaacaaggtgccggtcacatggcagaaggctacgccagagcttctggtaaaccaggtgttgtcttggttacttctgggccaggtgccaccaatgtcgttactccaatggcagatgcctttgcagacgggattccaatggttgtctttacagggcaagtcccaactagtgctatcggtactgatgctttccaagaggctgacgtcgttggtatttctagatcttgtacgaaatggaatgtcatggtcaagtccgtggaagaattgccattgcgtattaacgaggcttttgaaattgccacgagcggtagaccgggaccagtcttggtcgatttaccaaaggatgttacagcagctatcttaagaaatccaattccaacaaaaacaactcttccatcaaacgcactaaaccaattaaccagtcgcgcacaagatgaatttgtcatgcaaagtatcaataaagcagcagatttgatcaacttggcaaagaaacctgtcttatacgtcggtgctggtattttaaaccatgcagatggtccaagattactaaaagaattaagtgaccgtgctcaaatacctgtcaccactactttacaaggtttaggttcattcgaccaagaagatccaaaatcattggatatgcttggtatgcacggttgtgctactgccaacctggcagtgcaaaatgccgacttgataattgcagttggtgctagattcgacgaccgtgtcactggtaatatttctaaattcgctccagaagctcgtcgtgcagctgccgagggtagaggtggtattattcatttcgaggttagtccaaaaaacataaacaaggttgttcaaactcaaatagcagtggaaggtgatgctacgaccaatctgggcaaaatgatgtcaaagattttcccagttaaggagaggtctgaatggtttgctcaaataaataaatggaagaaggaatacccatacgcttatatggaggagactccaggatctaaaattaaaccacagacggttataaagaaactatccaaggttgccaacgacacaggaagacatgtcattgttacaacgggtgtggggcaacatcaaatgtgggctgctcaacactggacatggagaaatccacatactttcatcacatcaggtggtttaggtacgatgggttacggtctccctgccgccatcggtgctcaagttgcaaagccagaatctttggttattgacattgatggtgacgcatcctttaacatgactctaacggaattgagttctgccgttcaagctggtactccagtgaagattttgattttgaacaatgaagagcaaggtatggttactcaatggcaatccctgttctacgaacatcgttattcccacacacatcaattgaaccctgatttcataaaactagcggaggctatgggtttaaaaggtttaagagtcaagaagcaagaggaattggacgctaagttgaaagaattcgtttctaccaagggcccagttttgcttgaagtggaagttgataaaaaagttcctgttttgccaatggtggcaggtggtagcggtctagacgagttcataaattttgacccagaagttgaaagacaacagactgaattacgtcataagcgtacaggcggtaagcactgaggatccataaaaaacacgctttttcagttcgagtttatcattatcaatactgccatttcaaagaatacgtaaataattaatagtagtgattttcctaactttatttagtcaaaaaattagccttttaattctgctgtaacccgtacatgcccaaaatagggggcgggttacacagaatatataacatcgtaggtgtctgggtgaacagtttattcctggcatccactaaatataatggagcccgctttttaagctggcatccagaaaaaaaaagaatcccagcaccaaaatattgttttcttcaccaaccatcagttcataggtccattctcttagcgcaactacagagaacaggggcacaaacaggcaaaaaacgggcacaacctcaatggagtgatgcaacctgcctggagtaaatgatgacacaaggcaattgacccacgcatgtatctatctcattttcttacaccttctattaccttctgctctctctgatttggaaaaagctgaaaaaaaaggttgaaaccagttccctgaaattattcccctacttgactaataagtatataaagacggtaggtattgattgtaattctgtaaatctatttcttaaacttcttaaattctacttttatagttagtcttttttttagttttaaaacaccaagaacttagtttcgaataaacacacataaacaaacaaaaagcttatggcacctgttacaattgaaaagttcgtaaatcaagaagaacgacaccttgtttccaaccgatcagcaacaattccgtttggtgaatacatatttaaaagattgttgtccatcgatacgaaatcagttttcggtgttcctggtgacttcaacttatctctattagaatatctctattcacctagtgttgaatcagctggcctaagatgggtcggcacgtgtaatgaactgaacgccgcttatgcggccgacggatattcccgttactctaataagattggctgtttaataaccacgtatggcgttggtgaattaagcgccttgaacggtatagccggttcgttcgctgaaaatgtcaaagttttgcacattgttggtgtggccaagtccatagattcgcgttcaagtaactttagtgatcggaacctacatcatttggtcccacagctacatgattcaaattttaaagggccaaatcataaagtatatcatgatatggtaaaagatagagtcgcttgctcggtagcctacttggaggatattgaaactgcatgtgaccaagtcgataatgttatccgcgatatttacaagtattctaaacctggttatatttttgttcctgcagattttgcggatatgtctgttacatgtgataatttggttaatgttccacgtatatctcaacaagattgtatagtatacccttctgaaaaccaattgtctgacataatcaacaagattactagttggatatattccagtaaaacacctgcgatccttggagacgtactgactgataggtatggtgtgagtaactttttgaacaagcttatctgcaaaactgggatttggaatttttccactgttatgggaaaatctgtaattgatgagtcaaacccaacttatatgggtcaatataatggtaaagaaggtttaaaacaagtctatgaacattttgaactgtgcgacttggtcttgcattttggagtcgacatcaatgaaattaataatgggcattatacttttacttataaaccaaatgctaaaatcattcaatttcatccgaattatattcgccttgtggacactaggcagggcaatgagcaaatgttcaaaggaatcaattttgcccctattttaaaagaactatacaagcgcattgacgtttctaaactttctttgcaatatgattcaaatgtaactcaatatacgaacgaaacaatgcggttagaagatcctaccaatggacaatcaagcattattacacaagttcacttacaaaagacgatgcctaaatttttgaaccctggtgatgttgtcgtttgtgaaacaggctcttttcaattctctgttcgtgatttcgcgtttccttcgcaattaaaatatatatcgcaaggatttttcctttccattggcatggcccttcctgccgccctaggtgttggaattgccatgcaagaccactcaaacgctcacatcaatggtggcaacgtaaaagaggactataagccaagattaattttgtttgaaggtgacggtgcagcacagatgacaatccaagaactgagcaccattctgaagtgcaatattccactagaagttatcatttggaacaataacggctacactattgaaagagccatcatgggccctaccaggtcgtataacgacgttatgtcttggaaatggaccaaactatttgaagcattcggagacttcgacggaaagtatactaatagcactctcattcaatgtccctctaaattagcactgaaattggaggagcttaagaattcaaacaaaagaagcgggatagaacttttagaagtcaaattaggcgaattggatttccccgaacagctaaagtgcatggttgaagcagcggcacttaaaagaaataaaaaagtgacacatggttataatgtgcagcgatacaatcagttacgtaaaaattttggattttatagagcatattcttcactaagaggttgtaagagcgttttcagacgtatataggctaggtcatgtaattagttatgtcacgcttacattcacgccctccccccacatccgctctaaccgaaaaggaaggagttagacaacctgaagtctaggtccctatttatttttttatagttatgttagtattaagaacgttatttatatttcaaatttttcttttttttctgtacagacgcgtgtacgcatgtaacattatactgaaaaccttgcttgagaaggttttgggacgctcgaaggctttaatttgcgggtgtacaatatggacttcctcttttctggcaaccaaacccatacatcgggattcctataataccttcgttggtctccctaacatgtaggtggcggaggggagatatacaatagaacagataccagacaagacataatgggctaaacaagactacaccaattacactgcctcattgatggtggtacataacgaactaatactgtagccctagacttgatagccatcatcatatcgaagtttcactaccctttttccatttgccatctattgaagtaataataggcgcatgcaacttcttttctttttttttcttttctctctcccccgttgttgtctcaccatatccgcaatgacaaaaaaatgatggaagacactaaaggaaaaaattaacgacaaagacagcaccaacagatgtcgttgttccagagctgatgaggggtatctcgaagcacacgaaactttttccttccttcattcacgcacactactctctaatgagcaacggtatacggccttccttccagttacttgaatttgaaataaaaaaaagtttgctgtcttgctatcaagtataaatagacctgcaattattaatcttttgtttcctcgtcattgttctcgttccctttcttccttgtttctttttctgcacaatatttcaagctataccaagcatacaatcaactatctcatatacacatatgttgagaacgtcaacattgttcaccaggcgtgtccaaccaagcctattttctagaaacattcttagattgcaatccacagctgcattatatccagagaaattccaaggcattggtatctccaacgcaaaggattggaagcatcctaaacttgttagtttcgaccccaaacctttcggtgaccatgacgttgatgttgagattgaagcatgtggaatatgtgggagcgattttcatattgcagtaggcaattggggccctgttccggaaaatcaaattttgggtcacgaaattattggtagggtagtgaaggtgggttcaaaatgtcacacgggtgttaagattggtgatagggttggtgtaggtgcccaagcattggcttgtttcgaatgcgaaagatgcaaaagtgataacgaacaatactgtaccaacgatcatgttctaacaatgtggactccttacaaagatggatacatatctcaaggtggatttgcatcacatgttagattgcatgagcattttgcaattcaaattccggagaatatcccatcacctttggctgcaccattattgtgtgggggaataacagtgtttagtcctttattgagaaacggttgtggacctggtaagcgtgtggggattgttggcataggtggtattggtcacatggggatattactagctaaggccatgggagccgaagtttatgcgttcagtagaggacactccaagcgtgaagacagtatgaagttaggggcggaccattatattgccatgttggaggataaaggctggaccgaacaatattcaaatgctcttgatctgttagttgtgtgtagttcttctcttagtaaagttaattttgactcgattgtgaaaataatgaagattggcggctccattgtttccattgctgctccagaagttaacgagaagctggtactaaaaccactgggtctgatgggggtatctatctcatcttctgctatcggttcaagaaaagaaatagaacagctattaaagctagtcagcgagaaaaatgtgaagatttgggtagagaagctacccataagcgaggagggtgtatctcacgcatttacgagaatggaatccggagatgttaagtacaggtttacacttgtagactatgacaagaaattccataagtgagcggccgcataacaatactgacagtactaaataattgcctacttggcttcacatacgttgcatacgtcgatatagataataatgataatgacagcaggattatcgtaatacgtaatagttgaaaatctcaaaaatgtgtgggtcattacgtaaataatgataggaatgggattcttctatttttcctttttccattctagcagccgtcgggaaaacgtggcatcctctctttcgggctcaattggagtcacgctgccgtgagcatcctctctttccatatctaacaactgagcacgtaaccaatggaaaagcatgagcttagcgttgctccaaaaaagtattggatggttaataccatttgtctgttctcttctgactttgactcctcaaaaaaaaaaaatctacaatcaacagatcgcttcaattacgccctcacaaaaacttttttccttcttcttcgcccacgttaaattttatccctcatgttgtctaacggatttctgcacttgatttattataaaaagacaaagacataatacttctctatcaatttcagttattgttcttccttgcgttattcttctgttcttctttttcttttgtcatatataaccataaccaagtaatacatattcaaactcgagatgtccaaagctacttataaagaaagggctgcaacccatccatccccagtggcagctaaactgtttaacataatgcacgaaaaacaaactaacttatgcgcatcattagatgtaagaactactaaagagctactggagttggttgaggctttaggtccaaaaatttgtttgttgaagacacatgttgacatattaacagatttttctatggagggtaccgttaagcctctgaaagcgttaagcgcgaaatataactttcttttatttgaagaccgtaagtttgctgatattggaaatactgttaagttgcaatatagcgcaggagtttatagaattgccgaatgggctgacattacgaatgcccacggtgttgtaggtcctggcattgtgtctggattgaaacaagcggcagaggaagtgactaaggaaccaagaggtttactaatgctggcggaattatcttgcaaaggctctctagccaccggtgaatatacaaaaggtactgtggatattgcaaagtctgataaggacttcgtaatcggttttattgcacaaagagatatgggaggtcgtgagaattcaaaatgaagtgaagttcctatactttctagagaataggaacttctatagtgagtcgaataagggcgacacaaaatttattctaaatgcataataaatactgataacatcttatagtttgtattatattttgtattatcgttgacatgtataattttgatatcaaaaactgattttccctttattattttcgagatttattttcttaattctctttaacaaactagaaatattgtatatacaaaaaatcataaataatagatgaatagtttaattataggtgttcatcaatcgaaaaagcaacgtatcttatttaaagtgcgttgcttttttctcatttataaggttaaataattctcatatatcaagcaaagtgacaggcgcccttaaatattctgacaaatgctctttccctaaactccccccataaaaaaacccgccgaagcgggtttttacgttatttgcggattaacgattactcgttatcagaaccgcccagggggcccgagcttaagactggccgtcgttttacaacacagaaagagtttgtagaaacgcaaaaaggccatccgtcaggggccttctgcttagtttgatgcctggcagttccctactctcgccttccgcttcctcgctcactgactcgctgcgctcggtcgttcggctgcggcgagcggtatcagctcactcaaaggcggtaatacggttatccacagaatcaggggataacgcaggaaagaacatgtgagcaaaaggccagcaaaaggccaggaaccgtaaaaaggccgcgttgctggcgtttttccataggctccgcccccctgacgagcatcacaaaaatcgacgctcaagtcagaggtggcgaaacccgacaggactataaagataccaggcgtttccccctggaagctccctcgtgcgctctcctgttccgaccctgccgcttaccggatacctgtccgcctttctcccttcgggaagcgtggcgctttctcatagctcacgctgtaggtatctcagttcggtgtaggtcgttcgctccaagctgggctgtgtgcacgaaccccccgttcagcccgaccgctgcgccttatccggtaactatcgtcttgagtccaacccggtaagacacgacttatcgccactggcagcagccactggtaacaggattagcagagcgaggtatgtaggcggtgctacagagttcttgaagtggtgggctaactacggctacactagaagaacagtatttggtatctgcgctctgctgaagccagttaccttcggaaaaagagttggtagctcttgatccggcaaacaaaccaccgctggtagcggtggtttttttgtttgcaagcagcagattacgcgcagaaaaaaaggatctcaagaagatcctttgatcttttctacggggtctgacgctcagtggaacgacgcgcgcgtaactcacgttaagggattttggtcatgagcttgcgccgtcccgtcaagtcagcgtaatgctctgcttt

SEQ ID NO: 49 - DNA, 10946 bp, Artificial Sequence
  Plasmid pGV9835
tagaaaaactcatcgagcatcaaatgaaactgcaatttattcatatcaggattatcaataccatatttttgaaaaagccgtttctgtaatgaaggagaaaactcaccgaggcagttccataggatggcaagatcctggtatcggtctgcgattccgactcgtccaacatcaatacaacctattaatttcccctcgtcaaaaataaggttatcaagtgagaaatcaccatgagtgacgactgaatccggtgagaatggcaaaagtttatgcatttctttccagacttgttcaacaggccagccattacgctcgtcatcaaaatcactcgcatcaaccaaaccgttattcattcgtgattgcgcctgagcgaggcgaaatacgcgatcgctgttaaaaggacaattacaaacaggaatcgagtgcaaccggcgcaggaacactgccagcgcatcaacaatattttcacctgaatcaggatattcttctaatacctggaacgctgtttttccggggatcgcagtggtgagtaaccatgcatcatcaggagtacggataaaatgcttgatggtcggaagtggcataaattccgtcagccagtttagtctgaccatctcatctgtaacatcattggcaacgctacctttgccatgtttcagaaacaactctggcgcatcgggcttcccatacaagcgatagattgtcgcacctgattgcccgacattatcgcgagcccatttatacccatataaatcagcatccatgttggaatttaatcgcggcctcgacgtttcccgttgaatatggctcatattcttcctttttcaatattattgaagcatttatcagggttattgtctcatgagcggatacatatttgaatgtatttagaaaaataaacaaataggggtcagtgttacaaccaattaaccaattctgaacattatcgcgagcccatttatacctgaatatggctcataacaccccttgtttgcctggcggcagtagcgcggtggtcccacctgaccccatgccgaactcagaagtgaaacgccgtagcgccgatggtagtgtggggactccccatgcgagagtagggaactgccaggcatcaaataaaacgaaaggctcagtcgaaagactgggcctttcgcccgggctaattagggggtgtcgcccttattcgactctatagtgaagttcctattctctagaaagtataggaacttctgaagtggggagatctcaccagtaaaacatacgcatacacatacacacatagagcaagcaagcaggctagcaaccaggaaaggctgccagtgactgctactgggtgtctaagaaccgtagggcggattattgttgcggtggttggttgcgggtggttatgcgatggtacggtgcagaatcgtacggtgttggttatggaattagtatgggtatgtgatatgtggtaatatgtgatattgggttattgtgatttggaatactgaatatcgaatatgggatatggaatatggccatggcatggtatggtatgggatgggagtattctattttattttattttattctggttcctgcgtttagggtagggtaggaagaaggtgagtgcttttgtatataagtggagtgtctggatcagttttgtggattgtgaatgttagtttcccctttaatgtatatttgtattatttgcttttgagtactcaataaccaagcacaactactagttttaaaggatccatcctcttaaacagtacaaatcgcaaagaaaagctccacacccaaaccaaataattgcagtcgagatgctttcactacgtcaatctataagatttttcaagccagccacaagaactttgtgtagctctagatatctgcttcagcaaaaacccgtggtgatgttgactaaagctacaaaagagcagaaatcattggtgaaaaataggggtgcagaacttgttgtggactgtttggtagaacagggcgtaacacatgtttttggtatcccaggtgcaaaaatcgacgccgtgtttgatgcattacaagacaagggtccagaaattattgttgctagacatgagcaaaatgccgcatttatggcgcaagctgtaggtaggcttacaggtaaacctggtgttgtcctagttacgtctggcccaggagcctccaatttagcaactggtctattgacagctaatactgagggagatcctgtagttgcgttagccggtaatgtaattagagctgataggcttaagagaactcaccagtctctagacaacgctgctttattccaaccgatcaccaagtactcagtagaggtacaagacgtaaagaatatacctgaagctgtgacaaacgcatttcgtatagcttctgctggtcaggctggtgccgcgtttgtttcttttcctcaagacgttgtcaatgaagtgaccaatactaaaaacgttagagcggttgcagcccctaaactaggtccagccgcagacgacgcaattagcgctgcaattgctaaaattcagacggcgaaactaccagtagtccttgtcggtatgaagggcggaagaccagaagcaataaaagctgttcgtaagttattgaagaaagtccaattacctttcgttgagacttaccaagcagcaggtactttatctagagatttagaggatcagtattttggaaggataggtctatttagaaaccaaccaggagatttactattagaacaagctgatgttgtacttactatcggttatgatcctatagagtatgacccaaagttttggaacataaatggggatagaacaattatacatctagacgagataatcgccgacatcgatcacgcttatcaaccagatttagaactaatcggagatatcccgtcaacaatcaatcatattgaacatgatgctgtaaaggttgagttcgctgaacgtgagcagaaaatcttatctgatctaaagcaatatatgcatgagggtgaacaagttccagcagactggaaatctgaccgtgcacatcctttggaaatcgttaaggaactaagaaatgcggtcgatgatcatgtgactgttacatgtgatatcggttcacatgcaatttggatgtcacgttattttaggagctacgaaccattaactttaatgatatctaacgggatgcaaactctgggggttgcacttccttgggctattggcgctagtttagttaagcccggtgagaaggtggtatcggtatcaggtgatggtggctttctgttttcggctatggaattagaaactgcagtccgtttaaaagctcccattgtgcatattgtctggaatgattctacttacgacatggttgcttttcaacagttgaagaaatacaatagaacttcggctgtagactttggtaacatcgatattgtgaaatatgctgagtcttttggcgcaacaggcctgagggtggaaagtccagatcagttagctgatgtgttgagacaagggatgaatgccgagggaccggtaatcatagatgtgccagttgactactcagacaatattaatttggcttctgataaacttcctaaagagtttggcgagctaatgaagaccaaagccttataaggatccataaaaaacacgctttttcagttcgagtttatcattatcaatactgccatttcaaagaatacgtaaataattaatagtagtgattttcctaactttatttagtcaaaaaattagccttttaattctgctgtaacccgtacatgcccaaaatagggggcgggttacacagaatatataacatcgtaggtgtctgggtgaacagtttattcctggcatccactaaatataatggagcccgctttttaagctggcatccagaaaaaaaaagaatcccagcaccaaaatattgttttcttcaccaaccatcagttcataggtccattctcttagcgcaactacagagaacaggggcacaaacaggcaaaaaacgggcacaacctcaatggagtgatgcaacctgcctggagtaaatgatgacacaaggcaattgacccacgcatgtatctatctcattttcttacaccttctattaccttctgctctctctgatttggaaaaagctgaaaaaaaaggttgaaaccagttccctgaaattattcccctacttgactaataagtatataaagacggtaggtattgattgtaattctgtaaatctatttcttaaacttcttaaattctacttttatagttagtcttttttttagttttaaaacaccaagaacttagtttcgaataaacacacataaacaaacaaaaagcttatgtatactgttggagattatttgttagatagattgcatgaactaggcattgaagaaattttcggagttcccggggattacaatctgcaatttctagaccagattatttcacataaagacatgaaatgggtcggaaatgcaaatgagttaaatgcatcttacatggccgatggttatgccagaaccaaaaaggcggctgctttcttgactaccttcggggtgggtgaattatcggcagttaatggcttggctggatcatacgcagaaaacttgcctgtcgttgaaatcgttggctcgccaacatcaaaagttcaaaatgaaggaaaattcgtccaccacactttggcagatggtgacttcaagcacttcatgaaaatgcatgaacctgtaacggctgccagaactctactaactgctgagaatgcaactgtagagattgatcgtgtcttgagcgctcttttaaaggaaagaaagccagtctatattaacctgccagtagacgtcgcagcggccaaagcagagaagcctagcttaccacttaaaaaggaaaatagtacctcaaacacttcagatcaagagattcttaacaagatccaggaatctttgaaaaacgctaaaaagcccattgttataactggccatgagatcatatcatttggtttggagaaaacagtgacccagttcattagtaagacgaaactgccaataaccactctaaatttcggtaagtcctccgttgatgaagcgttgcctagcttcttgggtatttacaacggcaccttgtcagaacccaatctgaaagaatttgttgaatctgcagactttatattgatgttgggagtaaagttgactgacagctctactggtgcttttacacaccatctgaatgaaaacaagatgatatctcttaatatcgatgaaggtaagatattcaatgaaagaatacagaacttcgacttcgagagtctaatttcttccttactggacttaagtgaaatcgagtataaaggtaagtacattgacaaaaagcaggaagattttgttccgagcaacgcgctacttagtcaagatagattatggcaagctgttgaaaatctgacacaatccaatgagacaattgttgccgaacaaggtacctccttttttggcgcttcttccatcttcctaaagtccaagtctcatttcatagggcagccattgtggggtagcatcggttacacctttcctgctgctctagggtcccaaattgctgataaagaaagtagacatttgttgtttataggagacggatctttacaattgacagttcaagagttaggtttagccatcagagagaagattaatcctatctgcttcataataaacaacgatggctatacagttgagagggaaattcatggacctaatcaatcttataatgatataccaatgtggaattatagcaagttacctgaatcttttggggctaccgaggatcgtgttgtttctaagattgtaagaaccgaaaatgaatttgtttctgttatgaaggaagcacaagcggaccctaacaggatgtactggattgagttaattcttgctaaggagggtgcgccaaaggttctaaagaagatgggtaagttgttcgccgaacaaaacaaatccgtgacacatggttataatgtgcagcgatacaatcagttacgtaaaaattttggattttatagagcatattcttcactaagaggttgtaagagcgttttcagacgtatataggctaggtcatgtaattagttatgtcacgcttacattcacgccctccccccacatccgctctaaccgaaaaggaaggagttagacaacctgaagtctaggtccctatttatttttttatagttatgttagtattaagaacgttatttatatttcaaatttttcttttttttctgtacagacgcgtgtacgcatgtaacattatactgaaaaccttgcttgagaaggttttgggacgctcgaaggctttaatttgcgggtgtacaatatggacttcctcttttctggcaaccaaacccatacatcgggattcctataataccttcgttggtctccctaacatgtaggtggcggaggggagatatacaatagaacagataccagacaagacataatgggctaaacaagactacaccaattacactgcctcattgatggtggtacataacgaactaatactgtagccctagacttgatagccatcatcatatcgaagtttcactaccctttttccatttgccatctattgaagtaataataggcgcatgcaacttcttttctttttttttcttttctctctcccccgttgttgtctcaccatatccgcaatgacaaaaaaatgatggaagacactaaaggaaaaaattaacgacaaagacagcaccaacagatgtcgttgttccagagctgatgaggggtatctcgaagcacacgaaactttttccttccttcattcacgcacactactctctaatgagcaacggtatacggccttccttccagttacttgaatttgaaataaaaaaaagtttgctgtcttgctatcaagtataaatagacctgcaattattaatcttttgtttcctcgtcattgttctcgttccctttcttccttgtttctttttctgcacaatatttcaagctataccaagcatacaatcaactatctcatatacacatatgttgagaacgtcaacattgttcaccaggcgtgtccaaccaagcctattttctagaaacattcttagattgcaatccacagctgcattatatccagagaaattccaaggcattggtatctccaacgcaaaggattggaagcatcctaaacttgttagtttcgaccccaaacctttcggtgaccatgacgttgatgttgagattgaagcatgtggaatatgtgggagcgattttcatattgcagtaggcaattggggccctgttccggaaaatcaaattttgggtcacgaaattattggtagggtagtgaaggtgggttcaaaatgtcacacgggtgttaagattggtgatagggttggtgtaggtgcccaagcattggcttgtttcgaatgcgaaagatgcaaaagtgataacgaacaatactgtaccaacgatcatgttctaacaatgtggactccttacaaagatggatacatatctcaaggtggatttgcatcacatgttagattgcatgagcattttgcaattcaaattccggagaatatcccatcacctttggctgcaccattattgtgtgggggaataacagtgtttagtcctttattgagaaacggttgtggacctggtaagcgtgtggggattgttggcataggtggtattggtcacatggggatattactagctaaggccatgggagccgaagtttatgcgttcagtagaggacactccaagcgtgaagacagtatgaagttaggggcggaccattatattgccatgttggaggataaaggctggaccgaacaatattcaaatgctcttgatctgttagttgtgtgtagttcttctcttagtaaagttaattttgactcgattgtgaaaataatgaagattggcggctccattgtttccattgctgctccagaagttaacgagaagctggtactaaaaccactgggtctgatgggggtatctatctcatcttctgctatcggttcaagaaaagaaatagaacagctattaaagctagtcagcgagaaaaatgtgaagatttgggtagagaagctacccataagcgaggagggtgtatctcacgcatttacgagaatggaatccggagatgttaagtacaggtttacacttgtagactatgacaagaaattccataagtgagcggccgcataacaatactgacagtactaaataattgcctacttggcttcacatacgttgcatacgtcgatatagataataatgataatgacagcaggattatcgtaatacgtaatagttgaaaatctcaaaaatgtgtgggtcattacgtaaataatgataggaatgggattcttctatttttcctttttccattctagcagccgtcgggaaaacgtggcatcctctctttcgggctcaattggagtcacgctgccgtgagcatcctctctttccatatctaacaactgagcacgtaaccaatggaaaagcatgagcttagcgttgctccaaaaaagtattggatggttaataccatttgtctgttctcttctgactttgactcctcaaaaaaaaaaaatctacaatcaacagatcgcttcaattacgccctcacaaaaacttttttccttcttcttcgcccacgttaaattttatccctcatgttgtctaacggatttctgcacttgatttattataaaaagacaaagacataatacttctctatcaatttcagttattgttcttccttgcgttattcttctgttcttctttttcttttgtcatatataaccataaccaagtaatacatattcaaactcgagatgtccaaagctacttataaagaaagggctgcaacccatccatccccagtggcagctaaactgtttaacataatgcacgaaaaacaaactaacttatgcgcatcattagatgtaagaactactaaagagctactggagttggttgaggctttaggtccaaaaatttgtttgttgaagacacatgttgacatattaacagatttttctatggagggtaccgttaagcctctgaaagcgttaagcgcgaaatataactttcttttatttgaagaccgtaagtttgctgatattggaaatactgttaagttgcaatatagcgcaggagtttatagaattgccgaatgggctgacattacgaatgcccacggtgttgtaggtcctggcattgtgtctggattgaaacaagcggcagaggaagtgactaaggaaccaagaggtttactaatgctggcggaattatcttgcaaaggctctctagccaccggtgaatatacaaaaggtactgtggatattgcaaagtctgataaggacttcgtaatcggttttattgcacaaagagatatgggaggtcgtgagaattcaaaatgaagtgaagttcctatactttctagagaataggaacttctatagtgagtcgaataagggcgacacaaaatttattctaaatgcataataaatactgataacatcttatagtttgtattatattttgtattatcgttgacatgtataattttgatatcaaaaactgattttccctttattattttcgagatttattttcttaattctctttaacaaactagaaatattgtatatacaaaaaatcataaataatagatgaatagtttaattataggtgttcatcaatcgaaaaagcaacgtatcttatttaaagtgcgttgcttttttctcatttataaggttaaataattctcatatatcaagcaaagtgacaggcgcccttaaatattctgacaaatgctctttccctaaactccccccataaaaaaacccgccgaagcgggtttttacgttatttgcggattaacgattactcgttatcagaaccgcccagggggcccgagcttaagactggccgtcgttttacaacacagaaagagtttgtagaaacgcaaaaaggccatccgtcaggggccttctgcttagtttgatgcctggcagttccctactctcgccttccgcttcctcgctcactgactcgctgcgctcggtcgttcggctgcggcgagcggtatcagctcactcaaaggcggtaatacggttatccacagaatcaggggataacgcaggaaagaacatgtgagcaaaaggccagcaaaaggccaggaaccgtaaaaaggccgcgttgctggcgtttttccataggctccgcccccctgacgagcatcacaaaaatcgacgctcaagtcagaggtggcgaaacccgacaggactataaagataccaggcgtttccccctggaagctccctcgtgcgctctcctgttccgaccctgccgcttaccggatacctgtccgcctttctcccttcgggaagcgtggcgctttctcatagctcacgctgtaggtatctcagttcggtgtaggtcgttcgctccaagctgggctgtgtgcacgaaccccccgttcagcccgaccgctgcgccttatccggtaactatcgtcttgagtccaacccggtaagacacgacttatcgccactggcagcagccactggtaacaggattagcagagcgaggtatgtaggcggtgctacagagttcttgaagtggtgggctaactacggctacactagaagaacagtatttggtatctgcgctctgctgaagccagttaccttcggaaaaagagttggtagctcttgatccggcaaacaaaccaccgctggtagcggtggtttttttgtttgcaagcagcagattacgcgcagaaaaaaaggatctcaagaagatcctttgatcttttctacggggtctgacgctcagtggaacgacgcgcgcgtaactcacgttaagggattttggtcatgagcttgcgccgtcccgtcaagtcagcgtaatgctctgcttt

SEQ ID NO: 50 - DNA, 11189 bp, Artificial Sequence
  Plasmid pGV9836
tagaaaaactcatcgagcatcaaatgaaactgcaatttattcatatcaggattatcaataccatatttttgaaaaagccgtttctgtaatgaaggagaaaactcaccgaggcagttccataggatggcaagatcctggtatcggtctgcgattccgactcgtccaacatcaatacaacctattaatttcccctcgtcaaaaataaggttatcaagtgagaaatcaccatgagtgacgactgaatccggtgagaatggcaaaagtttatgcatttctttccagacttgttcaacaggccagccattacgctcgtcatcaaaatcactcgcatcaaccaaaccgttattcattcgtgattgcgcctgagcgaggcgaaatacgcgatcgctgttaaaaggacaattacaaacaggaatcgagtgcaaccggcgcaggaacactgccagcgcatcaacaatattttcacctgaatcaggatattcttctaatacctggaacgctgtttttccggggatcgcagtggtgagtaaccatgcatcatcaggagtacggataaaatgcttgatggtcggaagtggcataaattccgtcagccagtttagtctgaccatctcatctgtaacatcattggcaacgctacctttgccatgtttcagaaacaactctggcgcatcgggcttcccatacaagcgatagattgtcgcacctgattgcccgacattatcgcgagcccatttatacccatataaatcagcatccatgttggaatttaatcgcggcctcgacgtttcccgttgaatatggctcatattcttcctttttcaatattattgaagcatttatcagggttattgtctcatgagcggatacatatttgaatgtatttagaaaaataaacaaataggggtcagtgttacaaccaattaaccaattctgaacattatcgcgagcccatttatacctgaatatggctcataacaccccttgtttgcctggcggcagtagcgcggtggtcccacctgaccccatgccgaactcagaagtgaaacgccgtagcgccgatggtagtgtggggactccccatgcgagagtagggaactgccaggcatcaaataaaacgaaaggctcagtcgaaagactgggcctttcgcccgggctaattagggggtgtcgcccttattcgactctatagtgaagttcctattctctagaaagtataggaacttctgaagtggggagatctcaccagtaaaacatacgcatacacatacacacatagagcaagcaagcaggctagcaaccaggaaaggctgccagtgactgctactgggtgtctaagaaccgtagggcggattattgttgcggtggttggttgcgggtggttatgcgatggtacggtgcagaatcgtacggtgttggttatggaattagtatgggtatgtgatatgtggtaatatgtgatattgggttattgtgatttggaatactgaatatcgaatatgggatatggaatatggccatggcatggtatggtatgggatgggagtattctattttattttattttattctggttcctgcgtttagggtagggtaggaagaaggtgagtgcttttgtatataagtggagtgtctggatcagttttgtggattgtgaatgttagtttcccctttaatgtatatttgtattatttgcttttgagtactcaataaccaagcacaactactagttttaaaggatccatcctcttaaacagtacaaatcgcaaagaaaagctccacacccaaaccaaataattgcagtcgagatgctttcactacgtcaatctataagatttttcaagccagccacaagaactttgtgtagctctagatatctgcttatgttgactaaagctacaaaagagcagaaatcattggtgaaaaataggggtgcagaacttgttgtggactgtttggtagaacagggcgtaacacatgtttttggtatcccaggtgcaaaaatcgacgccgtgtttgatgcattacaagacaagggtccagaaattattgttgctagacatgagcaaaatgccgcatttatggcgcaagctgtaggtaggcttacaggtaaacctggtgttgtcctagttacgtctggcccaggagcctccaatttagcaactggtctattgacagctaatactgagggagatcctgtagttgcgttagccggtaatgtaattagagctgataggcttaagagaactcaccagtctctagacaacgctgctttattccaaccgatcaccaagtactcagtagaggtacaagacgtaaagaatatacctgaagctgtgacaaacgcatttcgtatagcttctgctggtcaggctggtgccgcgtttgtttcttttcctcaagacgttgtcaatgaagtgaccaatactaaaaacgttagagcggttgcagcccctaaactaggtccagccgcagacgacgcaattagcgctgcaattgctaaaattcagacggcgaaactaccagtagtccttgtcggtatgaagggcggaagaccagaagcaataaaagctgttcgtaagttattgaagaaagtccaattacctttcgttgagacttaccaagcagcaggtactttatctagagatttagaggatcagtattttggaaggataggtctatttagaaaccaaccaggagatttactattagaacaagctgatgttgtacttactatcggttatgatcctatagagtatgacccaaagttttggaacataaatggggatagaacaattatacatctagacgagataatcgccgacatcgatcacgcttatcaaccagatttagaactaatcggagatatcccgtcaacaatcaatcatattgaacatgatgctgtaaaggttgagttcgctgaacgtgagcagaaaatcttatctgatctaaagcaatatatgcatgagggtgaacaagttccagcagactggaaatctgaccgtgcacatcctttggaaatcgttaaggaactaagaaatgcggtcgatgatcatgtgactgttacatgtgatatcggttcacatgcaatttggatgtcacgttattttaggagctacgaaccattaactttaatgatatctaacgggatgcaaactctgggggttgcacttccttgggctattggcgctagtttagttaagcccggtgagaaggtggtatcggtatcaggtgatggtggctttctgttttcggctatggaattagaaactgcagtccgtttaaaagctcccattgtgcatattgtctggaatgattctacttacgacatggttgcttttcaacagttgaagaaatacaatagaacttcggctgtagactttggtaacatcgatattgtgaaatatgctgagtcttttggcgcaacaggcctgagggtggaaagtccagatcagttagctgatgtgttgagacaagggatgaatgccgagggaccggtaatcatagatgtgccagttgactactcagacaatattaatttggcttctgataaacttcctaaagagtttggcgagctaatgaagaccaaagccttataaggatccataaaaaacacgctttttcagttcgagtttatcattatcaatactgccatttcaaagaatacgtaaataattaatagtagtgattttcctaactttatttagtcaaaaaattagccttttaattctgctgtaacccgtacatgcccaaaatagggggcgggttacacagaatatataacatcgtaggtgtctgggtgaacagtttattcctggcatccactaaatataatggagcccgctttttaagctggcatccagaaaaaaaaagaatcccagcaccaaaatattgttttcttcaccaaccatcagttcataggtccattctcttagcgcaactacagagaacaggggcacaaacaggcaaaaaacgggcacaacctcaatggagtgatgcaacctgcctggagtaaatgatgacacaaggcaattgacccacgcatgtatctatctcattttcttacaccttctattaccttctgctctctctgatttggaaaaagctgaaaaaaaaggttgaaaccagttccctgaaattattcccctacttgactaataagtatataaagacggtaggtattgattgtaattctgtaaatctatttcttaaacttcttaaattctacttttatagttagtcttttttttagttttaaaacaccaagaacttagtttcgaataaacacacataaacaaacaaaaagcttatggcacctgttacaattgaaaagttcgtaaatcaagaagaacgacaccttgtttccaaccgatcagcaacaattccgtttggtgaatacatatttaaaagattgttgtccatcgatacgaaatcagttttcggtgttcctggtgacttcaacttatctctattagaatatctctattcacctagtgttgaatcagctggcctaagatgggtcggcacgtgtaatgaactgaacgccgcttatgcggccgacggatattcccgttactctaataagattggctgtttaataaccacgtatggcgttggtgaattaagcgccttgaacggtatagccggttcgttcgctgaaaatgtcaaagttttgcacattgttggtgtggccaagtccatagattcgcgttcaagtaactttagtgatcggaacctacatcatttggtcccacagctacatgattcaaattttaaagggccaaatcataaagtatatcatgatatggtaaaagatagagtcgcttgctcggtagcctacttggaggatattgaaactgcatgtgaccaagtcgataatgttatccgcgatatttacaagtattctaaacctggttatatttttgttcctgcagattttgcggatatgtctgttacatgtgataatttggttaatgttccacgtatatctcaacaagattgtatagtatacccttctgaaaaccaattgtctgacataatcaacaagattactagttggatatattccagtaaaacacctgcgatccttggagacgtactgactgataggtatggtgtgagtaactttttgaacaagcttatctgcaaaactgggatttggaatttttccactgttatgggaaaatctgtaattgatgagtcaaacccaacttatatgggtcaatataatggtaaagaaggtttaaaacaagtctatgaacattttgaactgtgcgacttggtcttgcattttggagtcgacatcaatgaaattaataatgggcattatacttttacttataaaccaaatgctaaaatcattcaatttcatccgaattatattcgccttgtggacactaggcagggcaatgagcaaatgttcaaaggaatcaattttgcccctattttaaaagaactatacaagcgcattgacgtttctaaactttctttgcaatatgattcaaatgtaactcaatatacgaacgaaacaatgcggttagaagatcctaccaatggacaatcaagcattattacacaagttcacttacaaaagacgatgcctaaatttttgaaccctggtgatgttgtcgtttgtgaaacaggctcttttcaattctctgttcgtgatttcgcgtttccttcgcaattaaaatatatatcgcaaggatttttcctttccattggcatggcccttcctgccgccctaggtgttggaattgccatgcaagaccactcaaacgctcacatcaatggtggcaacgtaaaagaggactataagccaagattaattttgtttgaaggtgacggtgcagcacagatgacaatccaagaactgagcaccattctgaagtgcaatattccactagaagttatcatttggaacaataacggctacactattgaaagagccatcatgggccctaccaggtcgtataacgacgttatgtcttggaaatggaccaaactatttgaagcattcggagacttcgacggaaagtatactaatagcactctcattcaatgtccctctaaattagcactgaaattggaggagcttaagaattcaaacaaaagaagcgggatagaacttttagaagtcaaattaggcgaattggatttccccgaacagctaaagtgcatggttgaagcagcggcacttaaaagaaataaaaaagtgacacatggttataatgtgcagcgatacaatcagttacgtaaaaattttggattttatagagcatattcttcactaagaggttgtaagagcgttttcagacgtatataggctaggtcatgtaattagttatgtcacgcttacattcacgccctccccccacatccgctctaaccgaaaaggaaggagttagacaacctgaagtctaggtccctatttatttttttatagttatgttagtattaagaacgttatttatatttcaaatttttcttttttttctgtacagacgcgtgtacgcatgtaacattatactgaaaaccttgcttgagaaggttttgggacgctcgaaggctttaatttgcgggtgtacaatatggacttcctcttttctggcaaccaaacccatacatcgggattcctataataccttcgttggtctccctaacatgtaggtggcggaggggagatatacaatagaacagataccagacaagacataatgggctaaacaagactacaccaattacactgcctcattgatggtggtacataacgaactaatactgtagccctagacttgatagccatcatcatatcgaagtttcactaccctttttccatttgccatctattgaagtaataataggcgcatgcaacttcttttctttttttttcttttctctctcccccgttgttgtctcaccatatccgcaatgacaaaaaaatgatggaagacactaaaggaaaaaattaacgacaaagacagcaccaacagatgtcgttgttccagagctgatgaggggtatctcgaagcacacgaaactttttccttccttcattcacgcacactactctctaatgagcaacggtatacggccttccttccagttacttgaatttgaaataaaaaaaagtttgctgtcttgctatcaagtataaatagacctgcaattattaatcttttgtttcctcgtcattgttctcgttccctttcttccttgtttctttttctgcacaatatttcaagctataccaagcatacaatcaactatctcatatacacatatgttgagaacgtcaacattgttcaccaggcgtgtccaaccaagcctattttctagaaacattcttagattgcaatccacagctgcattatatccagagaaattccaaggcattggtatctccaacgcaaaggattggaagcatcctaaacttgttagtttcgaccccaaacctttcggtgaccatgacgttgatgttgagattgaagcatgtggaatatgtgggagcgattttcatattgcagtaggcaattggggccctgttccggaaaatcaaattttgggtcacgaaattattggtagggtagtgaaggtgggttcaaaatgtcacacgggtgttaagattggtgatagggttggtgtaggtgcccaagcattggcttgtttcgaatgcgaaagatgcaaaagtgataacgaacaatactgtaccaacgatcatgttctaacaatgtggactccttacaaagatggatacatatctcaaggtggatttgcatcacatgttagattgcatgagcattttgcaattcaaattccggagaatatcccatcacctttggctgcaccattattgtgtgggggaataacagtgtttagtcctttattgagaaacggttgtggacctggtaagcgtgtggggattgttggcataggtggtattggtcacatggggatattactagctaaggccatgggagccgaagtttatgcgttcagtagaggacactccaagcgtgaagacagtatgaagttaggggcggaccattatattgccatgttggaggataaaggctggaccgaacaatattcaaatgctcttgatctgttagttgtgtgtagttcttctcttagtaaagttaattttgactcgattgtgaaaataatgaagattggcggctccattgtttccattgctgctccagaagttaacgagaagctggtactaaaaccactgggtctgatgggggtatctatctcatcttctgctatcggttcaagaaaagaaatagaacagctattaaagctagtcagcgagaaaaatgtgaagatttgggtagagaagctacccataagcgaggagggtgtatctcacgcatttacgagaatggaatccggagatgttaagtacaggtttacacttgtagactatgacaagaaattccataagtgagcggccgcataacaatactgacagtactaaataattgcctacttggcttcacatacgttgcatacgtcgatatagataataatgataatgacagcaggattatcgtaatacgtaatagttgaaaatctcaaaaatgtgtgggtcattacgtaaataatgataggaatgggattcttctatttttcctttttccattctagcagccgtcgggaaaacgtggcatcctctctttcgggctcaattggagtcacgctgccgtgagcatcctctctttccatatctaacaactgagcacgtaaccaatggaaaagcatgagcttagcgttgctccaaaaaagtattggatggttaataccatttgtctgttctcttctgactttgactcctcaaaaaaaaaaaatctacaatcaacagatcgcttcaattacgccctcacaaaaacttttttccttcttcttcgcccacgttaaattttatccctcatgttgtctaacggatttctgcacttgatttattataaaaagacaaagacataatacttctctatcaatttcagttattgttcttccttgcgttattcttctgttcttctttttcttttgtcatatataaccataaccaagtaatacatattcaaactcgagatgtccaaagctacttataaagaaagggctgcaacccatccatccccagtggcagctaaactgtttaacataatgcacgaaaaacaaactaacttatgcgcatcattagatgtaagaactactaaagagctactggagttggttgaggctttaggtccaaaaatttgtttgttgaagacacatgttgacatattaacagatttttctatggagggtaccgttaagcctctgaaagcgttaagcgcgaaatataactttcttttatttgaagaccgtaagtttgctgatattggaaatactgttaagttgcaatatagcgcaggagtttatagaattgccgaatgggctgacattacgaatgcccacggtgttgtaggtcctggcattgtgtctggattgaaacaagcggcagaggaagtgactaaggaaccaagaggtttactaatgctggcggaattatcttgcaaaggctctctagccaccggtgaatatacaaaaggtactgtggatattgcaaagtctgataaggacttcgtaatcggttttattgcacaaagagatatgggaggtcgtgagaattcaaaatgaagtgaagttcctatactttctagagaataggaacttctatagtgagtcgaataagggcgacacaaaatttattctaaatgcataataaatactgataacatcttatagtttgtattatattttgtattatcgttgacatgtataattttgatatcaaaaactgattttccctttattattttcgagatttattttcttaattctctttaacaaactagaaatattgtatatacaaaaaatcataaataatagatgaatagtttaattataggtgttcatcaatcgaaaaagcaacgtatcttatttaaagtgcgttgcttttttctcatttataaggttaaataattctcatatatcaagcaaagtgacaggcgcccttaaatattctgacaaatgctctttccctaaactccccccataaaaaaacccgccgaagcgggtttttacgttatttgcggattaacgattactcgttatcagaaccgcccagggggcccgagcttaagactggccgtcgttttacaacacagaaagagtttgtagaaacgcaaaaaggccatccgtcaggggccttctgcttagtttgatgcctggcagttccctactctcgccttccgcttcctcgctcactgactcgctgcgctcggtcgttcggctgcggcgagcggtatcagctcactcaaaggcggtaatacggttatccacagaatcaggggataacgcaggaaagaacatgtgagcaaaaggccagcaaaaggccaggaaccgtaaaaaggccgcgttgctggcgtttttccataggctccgcccccctgacgagcatcacaaaaatcgacgctcaagtcagaggtggcgaaacccgacaggactataaagataccaggcgtttccccctggaagctccctcgtgcgctctcctgttccgaccctgccgcttaccggatacctgtccgcctttctcccttcgggaagcgtggcgctttctcatagctcacgctgtaggtatctcagttcggtgtaggtcgttcgctccaagctgggctgtgtgcacgaaccccccgttcagcccgaccgctgcgccttatccggtaactatcgtcttgagtccaacccggtaagacacgacttatcgccactggcagcagccactggtaacaggattagcagagcgaggtatgtaggcggtgctacagagttcttgaagtggtgggctaactacggctacactagaagaacagtatttggtatctgcgctctgctgaagccagttaccttcggaaaaagagttggtagctcttgatccggcaaacaaaccaccgctggtagcggtggtttttttgtttgcaagcagcagattacgcgcagaaaaaaaggatctcaagaagatcctttgatcttttctacggggtctgacgctcagtggaacgacgcgcgcgtaactcacgttaagggattttggtcatgagcttgcgccgtcccgtcaagtcagcgtaatgctctgcttt

SEQ ID NO: 51 - DNA, 11207 bp, Artificial Sequence
  Plasmid pGV9837
tagaaaaactcatcgagcatcaaatgaaactgcaatttattcatatcaggattatcaataccatatttttgaaaaagccgtttctgtaatgaaggagaaaactcaccgaggcagttccataggatggcaagatcctggtatcggtctgcgattccgactcgtccaacatcaatacaacctattaatttcccctcgtcaaaaataaggttatcaagtgagaaatcaccatgagtgacgactgaatccggtgagaatggcaaaagtttatgcatttctttccagacttgttcaacaggccagccattacgctcgtcatcaaaatcactcgcatcaaccaaaccgttattcattcgtgattgcgcctgagcgaggcgaaatacgcgatcgctgttaaaaggacaattacaaacaggaatcgagtgcaaccggcgcaggaacactgccagcgcatcaacaatattttcacctgaatcaggatattcttctaatacctggaacgctgtttttccggggatcgcagtggtgagtaaccatgcatcatcaggagtacggataaaatgcttgatggtcggaagtggcataaattccgtcagccagtttagtctgaccatctcatctgtaacatcattggcaacgctacctttgccatgtttcagaaacaactctggcgcatcgggcttcccatacaagcgatagattgtcgcacctgattgcccgacattatcgcgagcccatttatacccatataaatcagcatccatgttggaatttaatcgcggcctcgacgtttcccgttgaatatggctcatattcttcctttttcaatattattgaagcatttatcagggttattgtctcatgagcggatacatatttgaatgtatttagaaaaataaacaaataggggtcagtgttacaaccaattaaccaattctgaacattatcgcgagcccatttatacctgaatatggctcataacaccccttgtttgcctggcggcagtagcgcggtggtcccacctgaccccatgccgaactcagaagtgaaacgccgtagcgccgatggtagtgtggggactccccatgcgagagtagggaactgccaggcatcaaataaaacgaaaggctcagtcgaaagactgggcctttcgcccgggctaattagggggtgtcgcccttattcgactctatagtgaagttcctattctctagaaagtataggaacttctgaagtggggagatctcaccagtaaaacatacgcatacacatacacacatagagcaagcaagcaggctagcaaccaggaaaggctgccagtgactgctactgggtgtctaagaaccgtagggcggattattgttgcggtggttggttgcgggtggttatgcgatggtacggtgcagaatcgtacggtgttggttatggaattagtatgggtatgtgatatgtggtaatatgtgatattgggttattgtgatttggaatactgaatatcgaatatgggatatggaatatggccatggcatggtatggtatgggatgggagtattctattttattttattttattctggttcctgcgtttagggtagggtaggaagaaggtgagtgcttttgtatataagtggagtgtctggatcagttttgtggattgtgaatgttagtttcccctttaatgtatatttgtattatttgcttttgagtactcaataaccaagcacaactactagttttaaaggatccatcctcttaaacagtacaaatcgcaaagaaaagctccacacccaaaccaaataattgcagtcgagatgctttcactacgtcaatctataagatttttcaagccagccacaagaactttgtgtagctctagatatctgcttcagcaaaaacccgtggtgatgttgactaaagctacaaaagagcagaaatcattggtgaaaaataggggtgcagaacttgttgtggactgtttggtagaacagggcgtaacacatgtttttggtatcccaggtgcaaaaatcgacgccgtgtttgatgcattacaagacaagggtccagaaattattgttgctagacatgagcaaaatgccgcatttatggcgcaagctgtaggtaggcttacaggtaaacctggtgttgtcctagttacgtctggcccaggagcctccaatttagcaactggtctattgacagctaatactgagggagatcctgtagttgcgttagccggtaatgtaattagagctgataggcttaagagaactcaccagtctctagacaacgctgctttattccaaccgatcaccaagtactcagtagaggtacaagacgtaaagaatatacctgaagctgtgacaaacgcatttcgtatagcttctgctggtcaggctggtgccgcgtttgtttcttttcctcaagacgttgtcaatgaagtgaccaatactaaaaacgttagagcggttgcagcccctaaactaggtccagccgcagacgacgcaattagcgctgcaattgctaaaattcagacggcgaaactaccagtagtccttgtcggtatgaagggcggaagaccagaagcaataaaagctgttcgtaagttattgaagaaagtccaattacctttcgttgagacttaccaagcagcaggtactttatctagagatttagaggatcagtattttggaaggataggtctatttagaaaccaaccaggagatttactattagaacaagctgatgttgtacttactatcggttatgatcctatagagtatgacccaaagttttggaacataaatggggatagaacaattatacatctagacgagataatcgccgacatcgatcacgcttatcaaccagatttagaactaatcggagatatcccgtcaacaatcaatcatattgaacatgatgctgtaaaggttgagttcgctgaacgtgagcagaaaatcttatctgatctaaagcaatatatgcatgagggtgaacaagttccagcagactggaaatctgaccgtgcacatcctttggaaatcgttaaggaactaagaaatgcggtcgatgatcatgtgactgttacatgtgatatcggttcacatgcaatttggatgtcacgttattttaggagctacgaaccattaactttaatgatatctaacgggatgcaaactctgggggttgcacttccttgggctattggcgctagtttagttaagcccggtgagaaggtggtatcggtatcaggtgatggtggctttctgttttcggctatggaattagaaactgcagtccgtttaaaagctcccattgtgcatattgtctggaatgattctacttacgacatggttgcttttcaacagttgaagaaatacaatagaacttcggctgtagactttggtaacatcgatattgtgaaatatgctgagtcttttggcgcaacaggcctgagggtggaaagtccagatcagttagctgatgtgttgagacaagggatgaatgccgagggaccggtaatcatagatgtgccagttgactactcagacaatattaatttggcttctgataaacttcctaaagagtttggcgagctaatgaagaccaaagccttataaggatccataaaaaacacgctttttcagttcgagtttatcattatcaatactgccatttcaaagaatacgtaaataattaatagtagtgattttcctaactttatttagtcaaaaaattagccttttaattctgctgtaacccgtacatgcccaaaatagggggcgggttacacagaatatataacatcgtaggtgtctgggtgaacagtttattcctggcatccactaaatataatggagcccgctttttaagctggcatccagaaaaaaaaagaatcccagcaccaaaatattgttttcttcaccaaccatcagttcataggtccattctcttagcgcaactacagagaacaggggcacaaacaggcaaaaaacgggcacaacctcaatggagtgatgcaacctgcctggagtaaatgatgacacaaggcaattgacccacgcatgtatctatctcattttcttacaccttctattaccttctgctctctctgatttggaaaaagctgaaaaaaaaggttgaaaccagttccctgaaattattcccctacttgactaataagtatataaagacggtaggtattgattgtaattctgtaaatctatttcttaaacttcttaaattctacttttatagttagtcttttttttagttttaaaacaccaagaacttagtttcgaataaacacacataaacaaacaaaaagcttatggcacctgttacaattgaaaagttcgtaaatcaagaagaacgacaccttgtttccaaccgatcagcaacaattccgtttggtgaatacatatttaaaagattgttgtccatcgatacgaaatcagttttcggtgttcctggtgacttcaacttatctctattagaatatctctattcacctagtgttgaatcagctggcctaagatgggtcggcacgtgtaatgaactgaacgccgcttatgcggccgacggatattcccgttactctaataagattggctgtttaataaccacgtatggcgttggtgaattaagcgccttgaacggtatagccggttcgttcgctgaaaatgtcaaagttttgcacattgttggtgtggccaagtccatagattcgcgttcaagtaactttagtgatcggaacctacatcatttggtcccacagctacatgattcaaattttaaagggccaaatcataaagtatatcatgatatggtaaaagatagagtcgcttgctcggtagcctacttggaggatattgaaactgcatgtgaccaagtcgataatgttatccgcgatatttacaagtattctaaacctggttatatttttgttcctgcagattttgcggatatgtctgttacatgtgataatttggttaatgttccacgtatatctcaacaagattgtatagtatacccttctgaaaaccaattgtctgacataatcaacaagattactagttggatatattccagtaaaacacctgcgatccttggagacgtactgactgataggtatggtgtgagtaactttttgaacaagcttatctgcaaaactgggatttggaatttttccactgttatgggaaaatctgtaattgatgagtcaaacccaacttatatgggtcaatataatggtaaagaaggtttaaaacaagtctatgaacattttgaactgtgcgacttggtcttgcattttggagtcgacatcaatgaaattaataatgggcattatacttttacttataaaccaaatgctaaaatcattcaatttcatccgaattatattcgccttgtggacactaggcagggcaatgagcaaatgttcaaaggaatcaattttgcccctattttaaaagaactatacaagcgcattgacgtttctaaactttctttgcaatatgattcaaatgtaactcaatatacgaacgaaacaatgcggttagaagatcctaccaatggacaatcaagcattattacacaagttcacttacaaaagacgatgcctaaatttttgaaccctggtgatgttgtcgtttgtgaaacaggctcttttcaattctctgttcgtgatttcgcgtttccttcgcaattaaaatatatatcgcaaggatttttcctttccattggcatggcccttcctgccgccctaggtgttggaattgccatgcaagaccactcaaacgctcacatcaatggtggcaacgtaaaagaggactataagccaagattaattttgtttgaaggtgacggtgcagcacagatgacaatccaagaactgagcaccattctgaagtgcaatattccactagaagttatcatttggaacaataacggctacactattgaaagagccatcatgggccctaccaggtcgtataacgacgttatgtcttggaaatggaccaaactatttgaagcattcggagacttcgacggaaagtatactaatagcactctcattcaatgtccctctaaattagcactgaaattggaggagcttaagaattcaaacaaaagaagcgggatagaacttttagaagtcaaattaggcgaattggatttccccgaacagctaaagtgcatggttgaagcagcggcacttaaaagaaataaaaaagtgacacatggttataatgtgcagcgatacaatcagttacgtaaaaattttggattttatagagcatattcttcactaagaggttgtaagagcgttttcagacgtatataggctaggtcatgtaattagttatgtcacgcttacattcacgccctccccccacatccgctctaaccgaaaaggaaggagttagacaacctgaagtctaggtccctatttatttttttatagttatgttagtattaagaacgttatttatatttcaaatttttcttttttttctgtacagacgcgtgtacgcatgtaacattatactgaaaaccttgcttgagaaggttttgggacgctcgaaggctttaatttgcgggtgtacaatatggacttcctcttttctggcaaccaaacccatacatcgggattcctataataccttcgttggtctccctaacatgtaggtggcggaggggagatatacaatagaacagataccagacaagacataatgggctaaacaagactacaccaattacactgcctcattgatggtggtacataacgaactaatactgtagccctagacttgatagccatcatcatatcgaagtttcactaccctttttccatttgccatctattgaagtaataataggcgcatgcaacttcttttctttttttttcttttctctctcccccgttgttgtctcaccatatccgcaatgacaaaaaaatgatggaagacactaaaggaaaaaattaacgacaaagacagcaccaacagatgtcgttgttccagagctgatgaggggtatctcgaagcacacgaaactttttccttccttcattcacgcacactactctctaatgagcaacggtatacggccttccttccagttacttgaatttgaaataaaaaaaagtttgctgtcttgctatcaagtataaatagacctgcaattattaatcttttgtttcctcgtcattgttctcgttccctttcttccttgtttctttttctgcacaatatttcaagctataccaagcatacaatcaactatctcatatacacatatgttgagaacgtcaacattgttcaccaggcgtgtccaaccaagcctattttctagaaacattcttagattgcaatccacagctgcattatatccagagaaattccaaggcattggtatctccaacgcaaaggattggaagcatcctaaacttgttagtttcgaccccaaacctttcggtgaccatgacgttgatgttgagattgaagcatgtggaatatgtgggagcgattttcatattgcagtaggcaattggggccctgttccggaaaatcaaattttgggtcacgaaattattggtagggtagtgaaggtgggttcaaaatgtcacacgggtgttaagattggtgatagggttggtgtaggtgcccaagcattggcttgtttcgaatgcgaaagatgcaaaagtgataacgaacaatactgtaccaacgatcatgttctaacaatgtggactccttacaaagatggatacatatctcaaggtggatttgcatcacatgttagattgcatgagcattttgcaattcaaattccggagaatatcccatcacctttggctgcaccattattgtgtgggggaataacagtgtttagtcctttattgagaaacggttgtggacctggtaagcgtgtggggattgttggcataggtggtattggtcacatggggatattactagctaaggccatgggagccgaagtttatgcgttcagtagaggacactccaagcgtgaagacagtatgaagttaggggcggaccattatattgccatgttggaggataaaggctggaccgaacaatattcaaatgctcttgatctgttagttgtgtgtagttcttctcttagtaaagttaattttgactcgattgtgaaaataatgaagattggcggctccattgtttccattgctgctccagaagttaacgagaagctggtactaaaaccactgggtctgatgggggtatctatctcatcttctgctatcggttcaagaaaagaaatagaacagctattaaagctagtcagcgagaaaaatgtgaagatttgggtagagaagctacccataagcgaggagggtgtatctcacgcatttacgagaatggaatccggagatgttaagtacaggtttacacttgtagactatgacaagaaattccataagtgagcggccgcataacaatactgacagtactaaataattgcctacttggcttcacatacgttgcatacgtcgatatagataataatgataatgacagcaggattatcgtaatacgtaatagttgaaaatctcaaaaatgtgtgggtcattacgtaaataatgataggaatgggattcttctatttttcctttttccattctagcagccgtcgggaaaacgtggcatcctctctttcgggctcaattggagtcacgctgccgtgagcatcctctctttccatatctaacaactgagcacgtaaccaatggaaaagcatgagcttagcgttgctccaaaaaagtattggatggttaataccatttgtctgttctcttctgactttgactcctcaaaaaaaaaaaatctacaatcaacagatcgcttcaattacgccctcacaaaaacttttttccttcttcttcgcccacgttaaattttatccctcatgttgtctaacggatttctgcacttgatttattataaaaagacaaagacataatacttctctatcaatttcagttattgttcttccttgcgttattcttctgttcttctttttcttttgtcatatataaccataaccaagtaatacatattcaaactcgagatgtccaaagctacttataaagaaagggctgcaacccatccatccccagtggcagctaaactgtttaacataatgcacgaaaaacaaactaacttatgcgcatcattagatgtaagaactactaaagagctactggagttggttgaggctttaggtccaaaaatttgtttgttgaagacacatgttgacatattaacagatttttctatggagggtaccgttaagcctctgaaagcgttaagcgcgaaatataactttcttttatttgaagaccgtaagtttgctgatattggaaatactgttaagttgcaatatagcgcaggagtttatagaattgccgaatgggctgacattacgaatgcccacggtgttgtaggtcctggcattgtgtctggattgaaacaagcggcagaggaagtgactaaggaaccaagaggtttactaatgctggcggaattatcttgcaaaggctctctagccaccggtgaatatacaaaaggtactgtggatattgcaaagtctgataaggacttcgtaatcggttttattgcacaaagagatatgggaggtcgtgagaattcaaaatgaagtgaagttcctatactttctagagaataggaacttctatagtgagtcgaataagggcgacacaaaatttattctaaatgcataataaatactgataacatcttatagtttgtattatattttgtattatcgttgacatgtataattttgatatcaaaaactgattttccctttattattttcgagatttattttcttaattctctttaacaaactagaaatattgtatatacaaaaaatcataaataatagatgaatagtttaattataggtgttcatcaatcgaaaaagcaacgtatcttatttaaagtgcgttgcttttttctcatttataaggttaaataattctcatatatcaagcaaagtgacaggcgcccttaaatattctgacaaatgctctttccctaaactccccccataaaaaaacccgccgaagcgggtttttacgttatttgcggattaacgattactcgttatcagaaccgcccagggggcccgagcttaagactggccgtcgttttacaacacagaaagagtttgtagaaacgcaaaaaggccatccgtcaggggccttctgcttagtttgatgcctggcagttccctactctcgccttccgcttcctcgctcactgactcgctgcgctcggtcgttcggctgcggcgagcggtatcagctcactcaaaggcggtaatacggttatccacagaatcaggggataacgcaggaaagaacatgtgagcaaaaggccagcaaaaggccaggaaccgtaaaaaggccgcgttgctggcgtttttccataggctccgcccccctgacgagcatcacaaaaatcgacgctcaagtcagaggtggcgaaacccgacaggactataaagataccaggcgtttccccctggaagctccctcgtgcgctctcctgttccgaccctgccgcttaccggatacctgtccgcctttctcccttcgggaagcgtggcgctttctcatagctcacgctgtaggtatctcagttcggtgtaggtcgttcgctccaagctgggctgtgtgcacgaaccccccgttcagcccgaccgctgcgccttatccggtaactatcgtcttgagtccaacccggtaagacacgacttatcgccactggcagcagccactggtaacaggattagcagagcgaggtatgtaggcggtgctacagagttcttgaagtggtgggctaactacggctacactagaagaacagtatttggtatctgcgctctgctgaagccagttaccttcggaaaaagagttggtagctcttgatccggcaaacaaaccaccgctggtagcggtggtttttttgtttgcaagcagcagattacgcgcagaaaaaaaggatctcaagaagatcctttgatcttttctacggggtctgacgctcagtggaacgacgcgcgcgtaactcacgttaagggattttggtcatgagcttgcgccgtcccgtcaagtcagcgtaatgctctgcttt

SEQ ID NO: 52 - DNA, 11201 bp, Artificial Sequence
  Plasmid pGV9838
tagaaaaactcatcgagcatcaaatgaaactgcaatttattcatatcaggattatcaataccatatttttgaaaaagccgtttctgtaatgaaggagaaaactcaccgaggcagttccataggatggcaagatcctggtatcggtctgcgattccgactcgtccaacatcaatacaacctattaatttcccctcgtcaaaaataaggttatcaagtgagaaatcaccatgagtgacgactgaatccggtgagaatggcaaaagtttatgcatttctttccagacttgttcaacaggccagccattacgctcgtcatcaaaatcactcgcatcaaccaaaccgttattcattcgtgattgcgcctgagcgaggcgaaatacgcgatcgctgttaaaaggacaattacaaacaggaatcgagtgcaaccggcgcaggaacactgccagcgcatcaacaatattttcacctgaatcaggatattcttctaatacctggaacgctgtttttccggggatcgcagtggtgagtaaccatgcatcatcaggagtacggataaaatgcttgatggtcggaagtggcataaattccgtcagccagtttagtctgaccatctcatctgtaacatcattggcaacgctacctttgccatgtttcagaaacaactctggcgcatcgggcttcccatacaagcgatagattgtcgcacctgattgcccgacattatcgcgagcccatttatacccatataaatcagcatccatgttggaatttaatcgcggcctcgacgtttcccgttgaatatggctcatattcttcctttttcaatattattgaagcatttatcagggttattgtctcatgagcggatacatatttgaatgtatttagaaaaataaacaaataggggtcagtgttacaaccaattaaccaattctgaacattatcgcgagcccatttatacctgaatatggctcataacaccccttgtttgcctggcggcagtagcgcggtggtcccacctgaccccatgccgaactcagaagtgaaacgccgtagcgccgatggtagtgtggggactccccatgcgagagtagggaactgccaggcatcaaataaaacgaaaggctcagtcgaaagactgggcctttcgcccgggctaattagggggtgtcgcccttattcgactctatagtgaagttcctattctctagaaagtataggaacttctgaagtggggagatctcaccagtaaaacatacgcatacacatacacacatagagcaagcaagcaggctagcaaccaggaaaggctgccagtgactgctactgggtgtctaagaaccgtagggcggattattgttgcggtggttggttgcgggtggttatgcgatggtacggtgcagaatcgtacggtgttggttatggaattagtatgggtatgtgatatgtggtaatatgtgatattgggttattgtgatttggaatactgaatatcgaatatgggatatggaatatggccatggcatggtatggtatgggatgggagtattctattttattttattttattctggttcctgcgtttagggtagggtaggaagaaggtgagtgcttttgtatataagtggagtgtctggatcagttttgtggattgtgaatgttagtttcccctttaatgtatatttgtattatttgcttttgagtactcaataaccaagcacaactactagttttaaaggatccatcctcttaaacagtacaaatcgcaaagaaaagctccacacccaaaccaaataattgcagtcgagatgatcagacaatctacgctaaaaaacttcgctattaagcgttgctttcaacatatagcataccgcaacacacctgccatgagatcagtagctctcgcgcagcgcttttatagttcgtcttcccgttattacagtgcgtctccattaccagcctctaaaaggccagagcctgctccaagtttcaatgttgatccattagaacagcccgctgaaccttcaaaattggctaagaaactacgcgctgagcctgacatggatacctctttcgtcggtttaactggtggtcaaatatttaacgaaatgatgtccagacaaaacgttgatactgtatttggttatccaggtggtgctatcctacctgtttacgatgccattcataacagtgataaattcaacttcgttcttccaaaacacgaacaaggtgccggtcacatggcagaaggctacgccagagcttctggtaaaccaggtgttgtcttggttacttctgggccaggtgccaccaatgtcgttactccaatggcagatgcctttgcagacgggattccaatggttgtctttacagggcaagtcccaactagtgctatcggtactgatgctttccaagaggctgacgtcgttggtatttctagatcttgtacgaaatggaatgtcatggtcaagtccgtggaagaattgccattgcgtattaacgaggcttttgaaattgccacgagcggtagaccgggaccagtcttggtcgatttaccaaaggatgttacagcagctatcttaagaaatccaattccaacaaaaacaactcttccatcaaacgcactaaaccaattaaccagtcgcgcacaagatgaatttgtcatgcaaagtatcaataaagcagcagatttgatcaacttggcaaagaaacctgtcttatacgtcggtgctggtattttaaaccatgcagatggtccaagattactaaaagaattaagtgaccgtgctcaaatacctgtcaccactactttacaaggtttaggttcattcgaccaagaagatccaaaatcattggatatgcttggtatgcacggttgtgctactgccaacctggcagtgcaaaatgccgacttgataattgcagttggtgctagattcgacgaccgtgtcactggtaatatttctaaattcgctccagaagctcgtcgtgcagctgccgagggtagaggtggtattattcatttcgaggttagtccaaaaaacataaacaaggttgttcaaactcaaatagcagtggaaggtgatgctacgaccaatctgggcaaaatgatgtcaaagattttcccagttaaggagaggtctgaatggtttgctcaaataaataaatggaagaaggaatacccatacgcttatatggaggagactccaggatctaaaattaaaccacagacggttataaagaaactatccaaggttgccaacgacacaggaagacatgtcattgttacaacgggtgtggggcaacatcaaatgtgggctgctcaacactggacatggagaaatccacatactttcatcacatcaggtggtttaggtacgatgggttacggtctccctgccgccatcggtgctcaagttgcaaagccagaatctttggttattgacattgatggtgacgcatcctttaacatgactctaacggaattgagttctgccgttcaagctggtactccagtgaagattttgattttgaacaatgaagagcaaggtatggttactcaatggcaatccctgttctacgaacatcgttattcccacacacatcaattgaaccctgatttcataaaactagcggaggctatgggtttaaaaggtttaagagtcaagaagcaagaggaattggacgctaagttgaaagaattcgtttctaccaagggcccagttttgcttgaagtggaagttgataaaaaagttcctgttttgccaatggtggcaggtggtagcggtctagacgagttcataaattttgacccagaagttgaaagacaacagactgaattacgtcataagcgtacaggcggtaagcactgaggatccataaaaaacacgctttttcagttcgagtttatcattatcaatactgccatttcaaagaatacgtaaataattaatagtagtgattttcctaactttatttagtcaaaaaattagccttttaattctgctgtaacccgtacatgcccaaaatagggggcgggttacacagaatatataacatcgtaggtgtctgggtgaacagtttattcctggcatccactaaatataatggagcccgctttttaagctggcatccagaaaaaaaaagaatcccagcaccaaaatattgttttcttcaccaaccatcagttcataggtccattctcttagcgcaactacagagaacaggggcacaaacaggcaaaaaacgggcacaacctcaatggagtgatgcaacctgcctggagtaaatgatgacacaaggcaattgacccacgcatgtatctatctcattttcttacaccttctattaccttctgctctctctgatttggaaaaagctgaaaaaaaaggttgaaaccagttccctgaaattattcccctacttgactaataagtatataaagacggtaggtattgattgtaattctgtaaatctatttcttaaacttcttaaattctacttttatagttagtcttttttttagttttaaaacaccaagaacttagtttcgaataaacacacataaacaaacaaaaagcttatgtatactgttggagattatttgttagatagattgcatgaactaggcattgaagaaattttcggagttcccggggattacaatctgcaatttctagaccagattatttcacataaagacatgaaatgggtcggaaatgcaaatgagttaaatgcatcttacatggccgatggttatgccagaaccaaaaaggcggctgctttcttgactaccttcggggtgggtgaattatcggcagttaatggcttggctggatcatacgcagaaaacttgcctgtcgttgaaatcgttggctcgccaacatcaaaagttcaaaatgaaggaaaattcgtccaccacactttggcagatggtgacttcaagcacttcatgaaaatgcatgaacctgtaacggctgccagaactctactaactgctgagaatgcaactgtagagattgatcgtgtcttgagcgctcttttaaaggaaagaaagccagtctatattaacctgccagtagacgtcgcagcggccaaagcagagaagcctagcttaccacttaaaaaggaaaatagtacctcaaacacttcagatcaagagattcttaacaagatccaggaatctttgaaaaacgctaaaaagcccattgttataactggccatgagatcatatcatttggtttggagaaaacagtgacccagttcattagtaagacgaaactgccaataaccactctaaatttcggtaagtcctccgttgatgaagcgttgcctagcttcttgggtatttacaacggcaccttgtcagaacccaatctgaaagaatttgttgaatctgcagactttatattgatgttgggagtaaagttgactgacagctctactggtgcttttacacaccatctgaatgaaaacaagatgatatctcttaatatcgatgaaggtaagatattcaatgaaagaatacagaacttcgacttcgagagtctaatttcttccttactggacttaagtgaaatcgagtataaaggtaagtacattgacaaaaagcaggaagattttgttccgagcaacgcgctacttagtcaagatagattatggcaagctgttgaaaatctgacacaatccaatgagacaattgttgccgaacaaggtacctccttttttggcgcttcttccatcttcctaaagtccaagtctcatttcatagggcagccattgtggggtagcatcggttacacctttcctgctgctctagggtcccaaattgctgataaagaaagtagacatttgttgtttataggagacggatctttacaattgacagttcaagagttaggtttagccatcagagagaagattaatcctatctgcttcataataaacaacgatggctatacagttgagagggaaattcatggacctaatcaatcttataatgatataccaatgtggaattatagcaagttacctgaatcttttggggctaccgaggatcgtgttgtttctaagattgtaagaaccgaaaatgaatttgtttctgttatgaaggaagcacaagcggaccctaacaggatgtactggattgagttaattcttgctaaggagggtgcgccaaaggttctaaagaagatgggtaagttgttcgccgaacaaaacaaatccgtgacacatggttataatgtgcagcgatacaatcagttacgtaaaaattttggattttatagagcatattcttcactaagaggttgtaagagcgttttcagacgtatataggctaggtcatgtaattagttatgtcacgcttacattcacgccctccccccacatccgctctaaccgaaaaggaaggagttagacaacctgaagtctaggtccctatttatttttttatagttatgttagtattaagaacgttatttatatttcaaatttttcttttttttctgtacagacgcgtgtacgcatgtaacattatactgaaaaccttgcttgagaaggttttgggacgctcgaaggctttaatttgcgggtgtacaatatggacttcctcttttctggcaaccaaacccatacatcgggattcctataataccttcgttggtctccctaacatgtaggtggcggaggggagatatacaatagaacagataccagacaagacataatgggctaaacaagactacaccaattacactgcctcattgatggtggtacataacgaactaatactgtagccctagacttgatagccatcatcatatcgaagtttcactaccctttttccatttgccatctattgaagtaataataggcgcatgcaacttcttttctttttttttcttttctctctcccccgttgttgtctcaccatatccgcaatgacaaaaaaatgatggaagacactaaaggaaaaaattaacgacaaagacagcaccaacagatgtcgttgttccagagctgatgaggggtatctcgaagcacacgaaactttttccttccttcattcacgcacactactctctaatgagcaacggtatacggccttccttccagttacttgaatttgaaataaaaaaaagtttgctgtcttgctatcaagtataaatagacctgcaattattaatcttttgtttcctcgtcattgttctcgttccctttcttccttgtttctttttctgcacaatatttcaagctataccaagcatacaatcaactatctcatatacacatatgttgagaacgtcaacattgttcaccaggcgtgtccaaccaagcctattttctagaaacattcttagattgcaatccacagctgcattatatccagagaaattccaaggcattggtatctccaacgcaaaggattggaagcatcctaaacttgttagtttcgaccccaaacctttcggtgaccatgacgttgatgttgagattgaagcatgtggaatatgtgggagcgattttcatattgcagtaggcaattggggccctgttccggaaaatcaaattttgggtcacgaaattattggtagggtagtgaaggtgggttcaaaatgtcacacgggtgttaagattggtgatagggttggtgtaggtgcccaagcattggcttgtttcgaatgcgaaagatgcaaaagtgataacgaacaatactgtaccaacgatcatgttctaacaatgtggactccttacaaagatggatacatatctcaaggtggatttgcatcacatgttagattgcatgagcattttgcaattcaaattccggagaatatcccatcacctttggctgcaccattattgtgtgggggaataacagtgtttagtcctttattgagaaacggttgtggacctggtaagcgtgtggggattgttggcataggtggtattggtcacatggggatattactagctaaggccatgggagccgaagtttatgcgttcagtagaggacactccaagcgtgaagacagtatgaagttaggggcggaccattatattgccatgttggaggataaaggctggaccgaacaatattcaaatgctcttgatctgttagttgtgtgtagttcttctcttagtaaagttaattttgactcgattgtgaaaataatgaagattggcggctccattgtttccattgctgctccagaagttaacgagaagctggtactaaaaccactgggtctgatgggggtatctatctcatcttctgctatcggttcaagaaaagaaatagaacagctattaaagctagtcagcgagaaaaatgtgaagatttgggtagagaagctacccataagcgaggagggtgtatctcacgcatttacgagaatggaatccggagatgttaagtacaggtttacacttgtagactatgacaagaaattccataagtgagcggccgcataacaatactgacagtactaaataattgcctacttggcttcacatacgttgcatacgtcgatatagataataatgataatgacagcaggattatcgtaatacgtaatagttgaaaatctcaaaaatgtgtgggtcattacgtaaataatgataggaatgggattcttctatttttcctttttccattctagcagccgtcgggaaaacgtggcatcctctctttcgggctcaattggagtcacgctgccgtgagcatcctctctttccatatctaacaactgagcacgtaaccaatggaaaagcatgagcttagcgttgctccaaaaaagtattggatggttaataccatttgtctgttctcttctgactttgactcctcaaaaaaaaaaaatctacaatcaacagatcgcttcaattacgccctcacaaaaacttttttccttcttcttcgcccacgttaaattttatccctcatgttgtctaacggatttctgcacttgatttattataaaaagacaaagacataatacttctctatcaatttcagttattgttcttccttgcgttattcttctgttcttctttttcttttgtcatatataaccataaccaagtaatacatattcaaactcgagatgtccaaagctacttataaagaaagggctgcaacccatccatccccagtggcagctaaactgtttaacataatgcacgaaaaacaaactaacttatgcgcatcattagatgtaagaactactaaagagctactggagttggttgaggctttaggtccaaaaatttgtttgttgaagacacatgttgacatattaacagatttttctatggagggtaccgttaagcctctgaaagcgttaagcgcgaaatataactttcttttatttgaagaccgtaagtttgctgatattggaaatactgttaagttgcaatatagcgcaggagtttatagaattgccgaatgggctgacattacgaatgcccacggtgttgtaggtcctggcattgtgtctggattgaaacaagcggcagaggaagtgactaaggaaccaagaggtttactaatgctggcggaattatcttgcaaaggctctctagccaccggtgaatatacaaaaggtactgtggatattgcaaagtctgataaggacttcgtaatcggttttattgcacaaagagatatgggaggtcgtgagaattcaaaatgaagtgaagttcctatactttctagagaataggaacttctatagtgagtcgaataagggcgacacaaaatttattctaaatgcataataaatactgataacatcttatagtttgtattatattttgtattatcgttgacatgtataattttgatatcaaaaactgattttccctttattattttcgagatttattttcttaattctctttaacaaactagaaatattgtatatacaaaaaatcataaataatagatgaatagtttaattataggtgttcatcaatcgaaaaagcaacgtatcttatttaaagtgcgttgcttttttctcatttataaggttaaataattctcatatatcaagcaaagtgacaggcgcccttaaatattctgacaaatgctctttccctaaactccccccataaaaaaacccgccgaagcgggtttttacgttatttgcggattaacgattactcgttatcagaaccgcccagggggcccgagcttaagactggccgtcgttttacaacacagaaagagtttgtagaaacgcaaaaaggccatccgtcaggggccttctgcttagtttgatgcctggcagttccctactctcgccttccgcttcctcgctcactgactcgctgcgctcggtcgttcggctgcggcgagcggtatcagctcactcaaaggcggtaatacggttatccacagaatcaggggataacgcaggaaagaacatgtgagcaaaaggccagcaaaaggccaggaaccgtaaaaaggccgcgttgctggcgtttttccataggctccgcccccctgacgagcatcacaaaaatcgacgctcaagtcagaggtggcgaaacccgacaggactataaagataccaggcgtttccccctggaagctccctcgtgcgctctcctgttccgaccctgccgcttaccggatacctgtccgcctttctcccttcgggaagcgtggcgctttctcatagctcacgctgtaggtatctcagttcggtgtaggtcgttcgctccaagctgggctgtgtgcacgaaccccccgttcagcccgaccgctgcgccttatccggtaactatcgtcttgagtccaacccggtaagacacgacttatcgccactggcagcagccactggtaacaggattagcagagcgaggtatgtaggcggtgctacagagttcttgaagtggtgggctaactacggctacactagaagaacagtatttggtatctgcgctctgctgaagccagttaccttcggaaaaagagttggtagctcttgatccggcaaacaaaccaccgctggtagcggtggtttttttgtttgcaagcagcagattacgcgcagaaaaaaaggatctcaagaagatcctttgatcttttctacggggtctgacgctcagtggaacgacgcgcgcgtaactcacgttaagggattttggtcatgagcttgcgccgtcccgtcaagtcagcgtaatgctctgcttt

SEQ ID NO: 53 - DNA, 11462 bp, Artificial Sequence
  Plasmid pGV9839
tagaaaaactcatcgagcatcaaatgaaactgcaatttattcatatcaggattatcaataccatatttttgaaaaagccgtttctgtaatgaaggagaaaactcaccgaggcagttccataggatggcaagatcctggtatcggtctgcgattccgactcgtccaacatcaatacaacctattaatttcccctcgtcaaaaataaggttatcaagtgagaaatcaccatgagtgacgactgaatccggtgagaatggcaaaagtttatgcatttctttccagacttgttcaacaggccagccattacgctcgtcatcaaaatcactcgcatcaaccaaaccgttattcattcgtgattgcgcctgagcgaggcgaaatacgcgatcgctgttaaaaggacaattacaaacaggaatcgagtgcaaccggcgcaggaacactgccagcgcatcaacaatattttcacctgaatcaggatattcttctaatacctggaacgctgtttttccggggatcgcagtggtgagtaaccatgcatcatcaggagtacggataaaatgcttgatggtcggaagtggcataaattccgtcagccagtttagtctgaccatctcatctgtaacatcattggcaacgctacctttgccatgtttcagaaacaactctggcgcatcgggcttcccatacaagcgatagattgtcgcacctgattgcccgacattatcgcgagcccatttatacccatataaatcagcatccatgttggaatttaatcgcggcctcgacgtttcccgttgaatatggctcatattcttcctttttcaatattattgaagcatttatcagggttattgtctcatgagcggatacatatttgaatgtatttagaaaaataaacaaataggggtcagtgttacaaccaattaaccaattctgaacattatcgcgagcccatttatacctgaatatggctcataacaccccttgtttgcctggcggcagtagcgcggtggtcccacctgaccccatgccgaactcagaagtgaaacgccgtagcgccgatggtagtgtggggactccccatgcgagagtagggaactgccaggcatcaaataaaacgaaaggctcagtcgaaagactgggcctttcgcccgggctaattagggggtgtcgcccttattcgactctatagtgaagttcctattctctagaaagtataggaacttctgaagtggggagatctcaccagtaaaacatacgcatacacatacacacatagagcaagcaagcaggctagcaaccaggaaaggctgccagtgactgctactgggtgtctaagaaccgtagggcggattattgttgcggtggttggttgcgggtggttatgcgatggtacggtgcagaatcgtacggtgttggttatggaattagtatgggtatgtgatatgtggtaatatgtgatattgggttattgtgatttggaatactgaatatcgaatatgggatatggaatatggccatggcatggtatggtatgggatgggagtattctattttattttattttattctggttcctgcgtttagggtagggtaggaagaaggtgagtgcttttgtatataagtggagtgtctggatcagttttgtggattgtgaatgttagtttcccctttaatgtatatttgtattatttgcttttgagtactcaataaccaagcacaactactagttttaaaggatccatcctcttaaacagtacaaatcgcaaagaaaagctccacacccaaaccaaataattgcagtcgagatgatcagacaatctacgctaaaaaacttcgctattaagcgttgctttcaacatatagcataccgcaacacacctgccatgagatcagtagctctcgcgcagcgcttttatagttcgtcttcccgttattacagtgcgtctccattaccagcctctaaaaggccagagcctgctccaagtttcaatgttgatccattagaacagcccgctgaaccttcaaaattggctaagaaactacgcgctgagcctgacatggatacctctttcgtcggtttaactggtggtcaaatatttaacgaaatgatgtccagacaaaacgttgatactgtatttggttatccaggtggtgctatcctacctgtttacgatgccattcataacagtgataaattcaacttcgttcttccaaaacacgaacaaggtgccggtcacatggcagaaggctacgccagagcttctggtaaaccaggtgttgtcttggttacttctgggccaggtgccaccaatgtcgttactccaatggcagatgcctttgcagacgggattccaatggttgtctttacagggcaagtcccaactagtgctatcggtactgatgctttccaagaggctgacgtcgttggtatttctagatcttgtacgaaatggaatgtcatggtcaagtccgtggaagaattgccattgcgtattaacgaggcttttgaaattgccacgagcggtagaccgggaccagtcttggtcgatttaccaaaggatgttacagcagctatcttaagaaatccaattccaacaaaaacaactcttccatcaaacgcactaaaccaattaaccagtcgcgcacaagatgaatttgtcatgcaaagtatcaataaagcagcagatttgatcaacttggcaaagaaacctgtcttatacgtcggtgctggtattttaaaccatgcagatggtccaagattactaaaagaattaagtgaccgtgctcaaatacctgtcaccactactttacaaggtttaggttcattcgaccaagaagatccaaaatcattggatatgcttggtatgcacggttgtgctactgccaacctggcagtgcaaaatgccgacttgataattgcagttggtgctagattcgacgaccgtgtcactggtaatatttctaaattcgctccagaagctcgtcgtgcagctgccgagggtagaggtggtattattcatttcgaggttagtccaaaaaacataaacaaggttgttcaaactcaaatagcagtggaaggtgatgctacgaccaatctgggcaaaatgatgtcaaagattttcccagttaaggagaggtctgaatggtttgctcaaataaataaatggaagaaggaatacccatacgcttatatggaggagactccaggatctaaaattaaaccacagacggttataaagaaactatccaaggttgccaacgacacaggaagacatgtcattgttacaacgggtgtggggcaacatcaaatgtgggctgctcaacactggacatggagaaatccacatactttcatcacatcaggtggtttaggtacgatgggttacggtctccctgccgccatcggtgctcaagttgcaaagccagaatctttggttattgacattgatggtgacgcatcctttaacatgactctaacggaattgagttctgccgttcaagctggtactccagtgaagattttgattttgaacaatgaagagcaaggtatggttactcaatggcaatccctgttctacgaacatcgttattcccacacacatcaattgaaccctgatttcataaaactagcggaggctatgggtttaaaaggtttaagagtcaagaagcaagaggaattggacgctaagttgaaagaattcgtttctaccaagggcccagttttgcttgaagtggaagttgataaaaaagttcctgttttgccaatggtggcaggtggtagcggtctagacgagttcataaattttgacccagaagttgaaagacaacagactgaattacgtcataagcgtacaggcggtaagcactgaggatccataaaaaacacgctttttcagttcgagtttatcattatcaatactgccatttcaaagaatacgtaaataattaatagtagtgattttcctaactttatttagtcaaaaaattagccttttaattctgctgtaacccgtacatgcccaaaatagggggcgggttacacagaatatataacatcgtaggtgtctgggtgaacagtttattcctggcatccactaaatataatggagcccgctttttaagctggcatccagaaaaaaaaagaatcccagcaccaaaatattgttttcttcaccaaccatcagttcataggtccattctcttagcgcaactacagagaacaggggcacaaacaggcaaaaaacgggcacaacctcaatggagtgatgcaacctgcctggagtaaatgatgacacaaggcaattgacccacgcatgtatctatctcattttcttacaccttctattaccttctgctctctctgatttggaaaaagctgaaaaaaaaggttgaaaccagttccctgaaattattcccctacttgactaataagtatataaagacggtaggtattgattgtaattctgtaaatctatttcttaaacttcttaaattctacttttatagttagtcttttttttagttttaaaacaccaagaacttagtttcgaataaacacacataaacaaacaaaaagcttatggcacctgttacaattgaaaagttcgtaaatcaagaagaacgacaccttgtttccaaccgatcagcaacaattccgtttggtgaatacatatttaaaagattgttgtccatcgatacgaaatcagttttcggtgttcctggtgacttcaacttatctctattagaatatctctattcacctagtgttgaatcagctggcctaagatgggtcggcacgtgtaatgaactgaacgccgcttatgcggccgacggatattcccgttactctaataagattggctgtttaataaccacgtatggcgttggtgaattaagcgccttgaacggtatagccggttcgttcgctgaaaatgtcaaagttttgcacattgttggtgtggccaagtccatagattcgcgttcaagtaactttagtgatcggaacctacatcatttggtcccacagctacatgattcaaattttaaagggccaaatcataaagtatatcatgatatggtaaaagatagagtcgcttgctcggtagcctacttggaggatattgaaactgcatgtgaccaagtcgataatgttatccgcgatatttacaagtattctaaacctggttatatttttgttcctgcagattttgcggatatgtctgttacatgtgataatttggttaatgttccacgtatatctcaacaagattgtatagtatacccttctgaaaaccaattgtctgacataatcaacaagattactagttggatatattccagtaaaacacctgcgatccttggagacgtactgactgataggtatggtgtgagtaactttttgaacaagcttatctgcaaaactgggatttggaatttttccactgttatgggaaaatctgtaattgatgagtcaaacccaacttatatgggtcaatataatggtaaagaaggtttaaaacaagtctatgaacattttgaactgtgcgacttggtcttgcattttggagtcgacatcaatgaaattaataatgggcattatacttttacttataaaccaaatgctaaaatcattcaatttcatccgaattatattcgccttgtggacactaggcagggcaatgagcaaatgttcaaaggaatcaattttgcccctattttaaaagaactatacaagcgcattgacgtttctaaactttctttgcaatatgattcaaatgtaactcaatatacgaacgaaacaatgcggttagaagatcctaccaatggacaatcaagcattattacacaagttcacttacaaaagacgatgcctaaatttttgaaccctggtgatgttgtcgtttgtgaaacaggctcttttcaattctctgttcgtgatttcgcgtttccttcgcaattaaaatatatatcgcaaggatttttcctttccattggcatggcccttcctgccgccctaggtgttggaattgccatgcaagaccactcaaacgctcacatcaatggtggcaacgtaaaagaggactataagccaagattaattttgtttgaaggtgacggtgcagcacagatgacaatccaagaactgagcaccattctgaagtgcaatattccactagaagttatcatttggaacaataacggctacactattgaaagagccatcatgggccctaccaggtcgtataacgacgttatgtcttggaaatggaccaaactatttgaagcattcggagacttcgacggaaagtatactaatagcactctcattcaatgtccctctaaattagcactgaaattggaggagcttaagaattcaaacaaaagaagcgggatagaacttttagaagtcaaattaggcgaattggatttccccgaacagctaaagtgcatggttgaagcagcggcacttaaaagaaataaaaaagtgacacatggttataatgtgcagcgatacaatcagttacgtaaaaattttggattttatagagcatattcttcactaagaggttgtaagagcgttttcagacgtatataggctaggtcatgtaattagttatgtcacgcttacattcacgccctccccccacatccgctctaaccgaaaaggaaggagttagacaacctgaagtctaggtccctatttatttttttatagttatgttagtattaagaacgttatttatatttcaaatttttcttttttttctgtacagacgcgtgtacgcatgtaacattatactgaaaaccttgcttgagaaggttttgggacgctcgaaggctttaatttgcgggtgtacaatatggacttcctcttttctggcaaccaaacccatacatcgggattcctataataccttcgttggtctccctaacatgtaggtggcggaggggagatatacaatagaacagataccagacaagacataatgggctaaacaagactacaccaattacactgcctcattgatggtggtacataacgaactaatactgtagccctagacttgatagccatcatcatatcgaagtttcactaccctttttccatttgccatctattgaagtaataataggcgcatgcaacttcttttctttttttttcttttctctctcccccgttgttgtctcaccatatccgcaatgacaaaaaaatgatggaagacactaaaggaaaaaattaacgacaaagacagcaccaacagatgtcgttgttccagagctgatgaggggtatctcgaagcacacgaaactttttccttccttcattcacgcacactactctctaatgagcaacggtatacggccttccttccagttacttgaatttgaaataaaaaaaagtttgctgtcttgctatcaagtataaatagacctgcaattattaatcttttgtttcctcgtcattgttctcgttccctttcttccttgtttctttttctgcacaatatttcaagctataccaagcatacaatcaactatctcatatacacatatgttgagaacgtcaacattgttcaccaggcgtgtccaaccaagcctattttctagaaacattcttagattgcaatccacagctgcattatatccagagaaattccaaggcattggtatctccaacgcaaaggattggaagcatcctaaacttgttagtttcgaccccaaacctttcggtgaccatgacgttgatgttgagattgaagcatgtggaatatgtgggagcgattttcatattgcagtaggcaattggggccctgttccggaaaatcaaattttgggtcacgaaattattggtagggtagtgaaggtgggttcaaaatgtcacacgggtgttaagattggtgatagggttggtgtaggtgcccaagcattggcttgtttcgaatgcgaaagatgcaaaagtgataacgaacaatactgtaccaacgatcatgttctaacaatgtggactccttacaaagatggatacatatctcaaggtggatttgcatcacatgttagattgcatgagcattttgcaattcaaattccggagaatatcccatcacctttggctgcaccattattgtgtgggggaataacagtgtttagtcctttattgagaaacggttgtggacctggtaagcgtgtggggattgttggcataggtggtattggtcacatggggatattactagctaaggccatgggagccgaagtttatgcgttcagtagaggacactccaagcgtgaagacagtatgaagttaggggcggaccattatattgccatgttggaggataaaggctggaccgaacaatattcaaatgctcttgatctgttagttgtgtgtagttcttctcttagtaaagttaattttgactcgattgtgaaaataatgaagattggcggctccattgtttccattgctgctccagaagttaacgagaagctggtactaaaaccactgggtctgatgggggtatctatctcatcttctgctatcggttcaagaaaagaaatagaacagctattaaagctagtcagcgagaaaaatgtgaagatttgggtagagaagctacccataagcgaggagggtgtatctcacgcatttacgagaatggaatccggagatgttaagtacaggtttacacttgtagactatgacaagaaattccataagtgagcggccgcataacaatactgacagtactaaataattgcctacttggcttcacatacgttgcatacgtcgatatagataataatgataatgacagcaggattatcgtaatacgtaatagttgaaaatctcaaaaatgtgtgggtcattacgtaaataatgataggaatgggattcttctatttttcctttttccattctagcagccgtcgggaaaacgtggcatcctctctttcgggctcaattggagtcacgctgccgtgagcatcctctctttccatatctaacaactgagcacgtaaccaatggaaaagcatgagcttagcgttgctccaaaaaagtattggatggttaataccatttgtctgttctcttctgactttgactcctcaaaaaaaaaaaatctacaatcaacagatcgcttcaattacgccctcacaaaaacttttttccttcttcttcgcccacgttaaattttatccctcatgttgtctaacggatttctgcacttgatttattataaaaagacaaagacataatacttctctatcaatttcagttattgttcttccttgcgttattcttctgttcttctttttcttttgtcatatataaccataaccaagtaatacatattcaaactcgagatgtccaaagctacttataaagaaagggctgcaacccatccatccccagtggcagctaaactgtttaacataatgcacgaaaaacaaactaacttatgcgcatcattagatgtaagaactactaaagagctactggagttggttgaggctttaggtccaaaaatttgtttgttgaagacacatgttgacatattaacagatttttctatggagggtaccgttaagcctctgaaagcgttaagcgcgaaatataactttcttttatttgaagaccgtaagtttgctgatattggaaatactgttaagttgcaatatagcgcaggagtttatagaattgccgaatgggctgacattacgaatgcccacggtgttgtaggtcctggcattgtgtctggattgaaacaagcggcagaggaagtgactaaggaaccaagaggtttactaatgctggcggaattatcttgcaaaggctctctagccaccggtgaatatacaaaaggtactgtggatattgcaaagtctgataaggacttcgtaatcggttttattgcacaaagagatatgggaggtcgtgagaattcaaaatgaagtgaagttcctatactttctagagaataggaacttctatagtgagtcgaataagggcgacacaaaatttattctaaatgcataataaatactgataacatcttatagtttgtattatattttgtattatcgttgacatgtataattttgatatcaaaaactgattttccctttattattttcgagatttattttcttaattctctttaacaaactagaaatattgtatatacaaaaaatcataaataatagatgaatagtttaattataggtgttcatcaatcgaaaaagcaacgtatcttatttaaagtgcgttgcttttttctcatttataaggttaaataattctcatatatcaagcaaagtgacaggcgcccttaaatattctgacaaatgctctttccctaaactccccccataaaaaaacccgccgaagcgggtttttacgttatttgcggattaacgattactcgttatcagaaccgcccagggggcccgagcttaagactggccgtcgttttacaacacagaaagagtttgtagaaacgcaaaaaggccatccgtcaggggccttctgcttagtttgatgcctggcagttccctactctcgccttccgcttcctcgctcactgactcgctgcgctcggtcgttcggctgcggcgagcggtatcagctcactcaaaggcggtaatacggttatccacagaatcaggggataacgcaggaaagaacatgtgagcaaaaggccagcaaaaggccaggaaccgtaaaaaggccgcgttgctggcgtttttccataggctccgcccccctgacgagcatcacaaaaatcgacgctcaagtcagaggtggcgaaacccgacaggactataaagataccaggcgtttccccctggaagctccctcgtgcgctctcctgttccgaccctgccgcttaccggatacctgtccgcctttctcccttcgggaagcgtggcgctttctcatagctcacgctgtaggtatctcagttcggtgtaggtcgttcgctccaagctgggctgtgtgcacgaaccccccgttcagcccgaccgctgcgccttatccggtaactatcgtcttgagtccaacccggtaagacacgacttatcgccactggcagcagccactggtaacaggattagcagagcgaggtatgtaggcggtgctacagagttcttgaagtggtgggctaactacggctacactagaagaacagtatttggtatctgcgctctgctgaagccagttaccttcggaaaaagagttggtagctcttgatccggcaaacaaaccaccgctggtagcggtggtttttttgtttgcaagcagcagattacgcgcagaaaaaaaggatctcaagaagatcctttgatcttttctacggggtctgacgctcagtggaacgacgcgcgcgtaactcacgttaagggattttggtcatgagcttgcgccgtcccgtcaagtcagcgtaatgctctgcttt

SEQ ID NO: 54 - DNA, 37 bp, Artificial Sequence
  Primer #1364
ttttgcggccgcttagatgccggagtcccagtgcttg

SEQ ID NO: 55 - DNA, 38 bp, Artificial Sequence
  Primer #458
gttcccggatcctcagttcaaatcagtaacaacccttg

SEQ ID NO: 56 - DNA, 34 bp, Artificial Sequence
  Primer #1608
gtcaacatgtcgactgcaattatttggtttgggt

SEQ ID NO: 57 - DNA, 34 bp, Artificial Sequence
  Primer #1609
gtggttagggatccaatcgatccaaagaagagag

SEQ ID NO: 58 - DNA, 35 bp, Artificial Sequence
  Primer #1610
tgcagagtcgaattcaagcttgtgtatatgccaaa

SEQ ID NO: 59 - DNA, 46 bp, Artificial Sequence
  Primer #1615
caactcgcggccgcggatcctaggttattggttttctggtctcaac

SEQ ID NO: 60 - DNA, 32 bp, Artificial Sequence
  Primer #1616
cgccgactcgagatgttgagaactcaagccgc

SEQ ID NO: 61 - DNA, 35 bp, Artificial Sequence
  Primer #1617
cgttgagtcgacatgggcttgttaacgaaagttgc

SEQ ID NO: 62 - DNA, 34 bp, Artificial Sequence
  Primer #1618
gccaacggatcctcaagcatctaaaacacaaccg

SEQ ID NO: 63 - DNA, 20 bp, Artificial Sequence
  Primer #1652
atttctttccagacttgttc

SEQ ID NO: 64 - DNA, 24 bp, Artificial Sequence
  Primer #1653
atctccccacttcagaagttccta

SEQ ID NO: 65 - DNA, 20 bp, Artificial Sequence
  Primer #1435
gttggcatagcggaaacttc

SEQ ID NO: 66 - DNA, 54 bp, Artificial Sequence
  Primer #1658
taggaacttctgaagtggggagatctcaccagtaaaacatacgcatacacatac

SEQ ID NO: 67 - DNA, 1023 bp, Lactococcus lactis
atgaaagcagcagtagtaagacacaatccagatggttatgcggaccttgttgaaaaggaacttcgagcaatcaaacctaatgaagctttgcttgacatggagtattgtggagtctgtcataccgatttgcacgttgcagcaggtgattatggcaacaaagcagggactgttcttggtcatgaaggaattggaattgtcaaagaaattggagctgatgtaagctcgcttcaagttggtgatcgggtttcagtggcttggttctttgaaggatgtggtcactgtgaatactgtgtatctggtaatgaaactttttgtcgagaagttaaaaatgcaggatattcagttgatggcggaatggctgaagaagcaattgttgttgccgattatgctgtcaaagttcctgacggacttgacccaattgaagctagctcaattacttgtgctggagtaacaacttacaaagcaatcaaagtatcaggagtaaaacctggtgattggcaagtaatttttggtgctggaggacttggaaatttagcaattcaatatgctaaaaatgtttttggagcaaaagtaattgctgttgatattaatcaagataaattaaatttagctaaaaaaattggagctgatgtgattatcaattctggtgatgtaaatccagttgatgaaattaaaaaaataactggcggcttaggggtgcaaagtgcaatagtttgtgctgttgcaaggattgcttttgaacaagcggttgcttctttgaaacctatgggcaaaatggttgctgtggcacttcccaatactgagatgactttatcagttccaacagttgtttttgacggagtggaggttgcaggttcacttgtcggaacaagacttgacttggcagaagcttttcaatttggagcagaaggtaaggtaaaaccaattgttgcgacacgcaaactggaagaaatcaatgatattattgatgaaatgaaggcaggaaaaattgaaggccgaatggtcattgattttactaaataa

SEQ ID NO: 68 - protein, 340 aa, Lactococcus lactis
MKAAVVRHNPDGYADLVEKELRAIKPNEALLDMEYCGVCHTDLHVAAGDYGNKAGTVLGHEGIGIVKEIGADVSSLQVGDRVSVAWFFEGCGHCEYCVSGNETFCREVKNAGYSVDGGMAEEAIVVADYAVKVPDGLDPIEASSITCAGVTTYKAIKVSGVKPGDWQVIFGAGGLGNLAIQYAKNVFGAKVIAVDINQDKLNLAKKIGADVIINSGDVNPVDEIKKITGGLGVQSAIVCAVARIAFEQAVASLKPMGKMVAVALPNTEMTLSVPTVVFDGVEVAGSLVGTRLDLAEAFQFGAEGKVKPIVATRKLEEINDIIDEMKAGKIEGRMVIDFTK

SEQ ID NO: 69 - DNA, 74 bp, Artificial Sequence
  Primer #1661
atccaaaatttttacgtaactgattgtatcgctgcacattataaccatgtgtcacggatttgttttgttcggcg

SEQ ID NO: 70 - DNA, 79 bp, Artificial Sequence
  Primer #1662
atccaaaatttttacgtaactgattgtatcgctgcacattataaccatgtgtcacttttttatttcttttaagtgccgc

SEQ ID NO: 71 - DNA, 91 bp, Artificial Sequence
  Primer #1663
aatcagttacgtaaaaattttggattttatagagcatattcttcactaagaggttgtaagagcgttttcagacgtatataggctagctaat

SEQ ID NO: 72 - DNA, 91 bp, Artificial Sequence
  Primer #1664
attagctagcctatatacgtctgaaaacgctcttacaacctcttagtgaagaatatgctctataaaatccaaaatttttacgtaactgatt

SEQ ID NO: 73 - DNA, 83 bp, Artificial Sequence
  Primer #1665
tactcgagatgctttcactacgtcaatctataagatttttcaagccagccacaagaactttgtgtagctctagatatctgctt

SEQ ID NO: 74 - DNA, 83 bp, Artificial Sequence
  Primer #1666
aagcagatatctagagctacacaaagttcttgtggctggcttgaaaaatcttatagattgacgtagtgaaagcatctcgagta

SEQ ID NO: 75 - DNA, 100 bp, Artificial Sequence
  Primer #1667
actcgagatgctttcactacgtcaatctataagatttttcaagccagccacaagaactttgtgtagctctagatatctgcttcagcaaaaacccgtggtg

SEQ ID NO: 76 - DNA, 100 bp, Artificial Sequence
  Primer #1668
caccacgggtttttgctgaagcagatatctagagctacacaaagttcttgtggctggcttgaaaaatcttatagattgacgtagtgaaagcatctcgagt

SEQ ID NO: 77 - DNA, 50 bp, Artificial Sequence
  Primer #1681
tttgtgtagctctagatatctgcttatgttgactaaagctacaaaagagc

SEQ ID NO: 78 - DNA, 50 bp, Artificial Sequence
  Primer #1682
tctgcttcagcaaaaacccgtggtgatgttgactaaagctacaaaagagc

SEQ ID NO: 79 - DNA, 22 bp, Artificial Sequence
  Primer #1683
tactcgagatgctttcactacg

SEQ ID NO: 80 - DNA, 24 bp, Artificial Sequence
  Primer #1684
attagctagcctatatacgtctga

SEQ ID NO: 81 - DNA, 32 bp, Artificial Sequence
  Primer #1685
attactcgagatgatcagacaatctacgctaa

SEQ ID NO: 82 - DNA, 99 bp, Artificial Sequence
  Primer #ADH3MTSF
aattcatatgttgagaacgtcaacattgttcaccaggcgtgtccaaccaagcctattttctagaaacattcttagattgcaatccacagctgcattata

SEQ ID NO: 83 - DNA, 99 bp, Artificial Sequence
  Primer #ADH3MTSR
tataatgcagctgtggattgcaatctaagaatgtttctagaaaataggcttggttggacacgcctggtgaacaatgttgacgttctcaacatatgaatt

SEQ ID NO: 84 - DNA, 37 bp, Artificial Sequence
  Primer #ADH7F
atccacagctgcattatatccagagaaattccaaggc

SEQ ID NO: 85 - DNA, 20 bp, Artificial Sequence
  Primer #ADH7R
gctcccatggccttagctag

SEQ ID NO: 86 - DNA, 25 bp, Artificial Sequence
  Primer #ADH37F
aattcatatgttgagaacgtcaaca

SEQ ID NO: 87 - DNA, 99 bp, Artificial Sequence
  Primer #DmADH3MTSF
aattcatatgttgagaacgtcaacattgttcaccaggcgtgtccaaccaagcctattttctagaaacattcttagattgcaatccacagctgcatcgtt

SEQ ID NO: 88 - DNA, 99 bp, Artificial Sequence
  Primer #DmADH3MTSR
aacgatgcagctgtggattgcaatctaagaatgtttctagaaaataggcttggttggacacgcctggtgaacaatgttgacgttctcaacatatgaatt

SEQ ID NO: 89 - DNA, 31 bp, Artificial Sequence
  Primer #DmADH3R
aattgcggccgcttagatgccggagtcccag

SEQ ID NO: 90 - DNA, 34 bp, Artificial Sequence
  Primer #DmADH3F
atccacagctgcatcgtttactttgaccaacaag

SEQ ID NO: 91 - DNA, 31 bp, Artificial Sequence
  Primer #DmADHF
ttttcatatgtcgtttactttgaccaacaag

SEQ ID NO: 92 - DNA, 11685 bp, Artificial Sequence
  Primer pGV1875
tagaaaaactcatcgagcatcaaatgaaactgcaatttattcatatcaggattatcaataccatatttttgaaaaagccgtttctgtaatgaaggagaaaactcaccgaggcagttccataggatggcaagatcctggtatcggtctgcgattccgactcgtccaacatcaatacaacctattaatttcccctcgtcaaaaataaggttatcaagtgagaaatcaccatgagtgacgactgaatccggtgagaatggcaaaagtttatgcatttctttccagacttgttcaacaggccagccattacgctcgtcatcaaaatcactcgcatcaaccaaaccgttattcattcgtgattgcgcctgagcgaggcgaaatacgcgatcgctgttaaaaggacaattacaaacaggaatcgagtgcaaccggcgcaggaacactgccagcgcatcaacaatattttcacctgaatcaggatattcttctaatacctggaacgctgtttttccggggatcgcagtggtgagtaaccatgcatcatcaggagtacggataaaatgcttgatggtcggaagtggcataaattccgtcagccagtttagtctgaccatctcatctgtaacatcattggcaacgctacctttgccatgtttcagaaacaactctggcgcatcgggcttcccatacaagcgatagattgtcgcacctgattgcccgacattatcgcgagcccatttatacccatataaatcagcatccatgttggaatttaatcgcggcctcgacgtttcccgttgaatatggctcatattcttcctttttcaatattattgaagcatttatcagggttattgtctcatgagcggatacatatttgaatgtatttagaaaaataaacaaataggggtcagtgttacaaccaattaaccaattctgaacattatcgcgagcccatttatacctgaatatggctcataacaccccttgtttgcctggcggcagtagcgcggtggtcccacctgaccccatgccgaactcagaagtgaaacgccgtagcgccgatggtagtgtggggactccccatgcgagagtagggaactgccaggcatcaaataaaacgaaaggctcagtcgaaagactgggcctttcgcccgggctaattagggggtgtcgcccttattcgactctatagtgaagttcctattctctagaaagtataggaacttctgaagtggggaagcaaggcagaaactaacttcttcttcatgtaataaacacaccccgcgtttatttacctatctctaaacttcaacaccttatatcataactaatatttcttgagataagcacactgcacccataccttccttaaaaacgtagcttccagtttttggtggttccggcttccttcccgattccgcccgctaaacgcatatttttgttgcctggtggcatttgcaaaatgcataacctatgcatttaaaagattatgtatgctcttctgacttttcgtgtgatgaggctcgtggaaaaaatgaataatttatgaatttgagaacaattttgtgttgttacggtattttactatggaataatcaatcaattgaggattttatgcaaatatcgtttgaatatttttccgaccctttgagtacttttcttcataattgcataatattgtccgctgcccctttttctgttagacggtgtcttgatctacttgctatcgttcaacaccaccttattttctaactattttttttttagctcatttgaatcagcttatggtgatggcacatttttgcataaacctagctgtcctcgttgaacataggaaaaaaaaatatataaacaaggctctttcactctccttgcaatcagatttgggtttgttccctttattttcatatttcttgtcatattcctttctcaattattattttctactcataacctcacgcaaaataacacagtcaaatcaatcaaagtcgagatgctttcactacgtcaatctataagatttttcaagccagccacaagaactttgtgtagctctagatatctgcttcagcaaaaacccgtggtgatgttgactaaagctacaaaagagcagaaatcattggtgaaaaataggggtgcagaacttgttgtggactgtttggtagaacagggcgtaacacatgtttttggtatcccaggtgcaaaaatcgacgccgtgtttgatgcattacaagacaagggtccagaaattattgttgctagacatgagcaaaatgccgcatttatggcgcaagctgtaggtaggcttacaggtaaacctggtgttgtcctagttacgtctggcccaggagcctccaatttagcaactggtctattgacagctaatactgagggagatcctgtagttgcgttagccggtaatgtaattagagctgataggcttaagagaactcaccagtctctagacaacgctgctttattccaaccgatcaccaagtactcagtagaggtacaagacgtaaagaatatacctgaagctgtgacaaacgcatttcgtatagcttctgctggtcaggctggtgccgcgtttgtttcttttcctcaagacgttgtcaatgaagtgaccaatactaaaaacgttagagcggttgcagcccctaaactaggtccagccgcagacgacgcaattagcgctgcaattgctaaaattcagacggcgaaactaccagtagtccttgtcggtatgaagggcggaagaccagaagcaataaaagctgttcgtaagttattgaagaaagtccaattacctttcgttgagacttaccaagcagcaggtactttatctagagatttagaggatcagtattttggaaggataggtctatttagaaaccaaccaggagatttactattagaacaagctgatgttgtacttactatcggttatgatcctatagagtatgacccaaagttttggaacataaatggggatagaacaattatacatctagacgagataatcgccgacatcgatcacgcttatcaaccagatttagaactaatcggagatatcccgtcaacaatcaatcatattgaacatgatgctgtaaaggttgagttcgctgaacgtgagcagaaaatcttatctgatctaaagcaatatatgcatgagggtgaacaagttccagcagactggaaatctgaccgtgcacatcctttggaaatcgttaaggaactaagaaatgcggtcgatgatcatgtgactgttacatgtgatatcggttcacatgcaatttggatgtcacgttattttaggagctacgaaccattaactttaatgatatctaacgggatgcaaactctgggggttgcacttccttgggctattggcgctagtttagttaagcccggtgagaaggtggtatcggtatcaggtgatggtggctttctgttttcggctatggaattagaaactgcagtccgtttaaaagctcccattgtgcatattgtctggaatgattctacttacgacatggttgcttttcaacagttgaagaaatacaatagaacttcggctgtagactttggtaacatcgatattgtgaaatatgctgagtcttttggcgcaacaggcctgagggtggaaagtccagatcagttagctgatgtgttgagacaagggatgaatgccgagggaccggtaatcatagatgtgccagttgactactcagacaatattaatttggcttctgataaacttcctaaagagtttggcgagctaatgaagaccaaagccttataaggatccataaaaaacacgctttttcagttcgagtttatcattatcaatactgccatttcaaagaatacgtaaataattaatagtagtgattttcctaactttatttagtcaaaaaattagccttttaattctgctgtaacccgtacatgcccaaaatagggggcgggttacacagaatatataacatcgtaggtgtctgggtgaacagtttattcctggcatccactaaatataatggagcccgctttttaagctggcatccagaaaaaaaaagaatcccagcaccaaaatattgttttcttcaccaaccatcagttcataggtccattctcttagcgcaactacagagaacaggggcacaaacaggcaaaaaacgggcacaacctcaatggagtgatgcaacctgcctggagtaaatgatgacacaaggcaattgacccacgcatgtatctatctcattttcttacaccttctattaccttctgctctctctgatttggaaaaagctgaaaaaaaaggttgaaaccagttccctgaaattattcccctacttgactaataagtatataaagacggtaggtattgattgtaattctgtaaatctatttcttaaacttcttaaattctacttttatagttagtcttttttttagttttaaaacaccaagaacttagtttcgaataaacacacataaacaaacaaaaagcttatgtatactgttggagattatttgttagatagattgcatgaactaggcattgaagaaattttcggagttcccggggattacaatctgcaatttctagaccagattatttcacataaagacatgaaatgggtcggaaatgcaaatgagttaaatgcatcttacatggccgatggttatgccagaaccaaaaaggcggctgctttcttgactaccttcggggtgggtgaattatcggcagttaatggcttggctggatcatacgcagaaaacttgcctgtcgttgaaatcgttggctcgccaacatcaaaagttcaaaatgaaggaaaattcgtccaccacactttggcagatggtgacttcaagcacttcatgaaaatgcatgaacctgtaacggctgccagaactctactaactgctgagaatgcaactgtagagattgatcgtgtcttgagcgctcttttaaaggaaagaaagccagtctatattaacctgccagtagacgtcgcagcggccaaagcagagaagcctagcttaccacttaaaaaggaaaatagtacctcaaacacttcagatcaagagattcttaacaagatccaggaatctttgaaaaacgctaaaaagcccattgttataactggccatgagatcatatcatttggtttggagaaaacagtgacccagttcattagtaagacgaaactgccaataaccactctaaatttcggtaagtcctccgttgatgaagcgttgcctagcttcttgggtatttacaacggcaccttgtcagaacccaatctgaaagaatttgttgaatctgcagactttatattgatgttgggagtaaagttgactgacagctctactggtgcttttacacaccatctgaatgaaaacaagatgatatctcttaatatcgatgaaggtaagatattcaatgaaagaatacagaacttcgacttcgagagtctaatttcttccttactggacttaagtgaaatcgagtataaaggtaagtacattgacaaaaagcaggaagattttgttccgagcaacgcgctacttagtcaagatagattatggcaagctgttgaaaatctgacacaatccaatgagacaattgttgccgaacaaggtacctccttttttggcgcttcttccatcttcctaaagtccaagtctcatttcatagggcagccattgtggggtagcatcggttacacctttcctgctgctctagggtcccaaattgctgataaagaaagtagacatttgttgtttataggagacggatctttacaattgacagttcaagagttaggtttagccatcagagagaagattaatcctatctgcttcataataaacaacgatggctatacagttgagagggaaattcatggacctaatcaatcttataatgatataccaatgtggaattatagcaagttacctgaatcttttggggctaccgaggatcgtgttgtttctaagattgtaagaaccgaaaatgaatttgtttctgttatgaaggaagcacaagcggaccctaacaggatgtactggattgagttaattcttgctaaggagggtgcgccaaaggttctaaagaagatgggtaagttgttcgccgaacaaaacaaatccgtgacacatggttataatgtgcagcgatacaatcagttacgtaaaaattttggattttatagagcatattcttcactaagaggttgtaagagcgttttcagacgtatataggctaggtcatgtaattagttatgtcacgcttacattcacgccctccccccacatccgctctaaccgaaaaggaaggagttagacaacctgaagtctaggtccctatttatttttttatagttatgttagtattaagaacgttatttatatttcaaatttttcttttttttctgtacagacgcgtgtacgcatgtaacattatactgaaaaccttgcttgagaaggttttgggacgctcgaaggctttaatttgcgggtgtacaatatggacttcctcttttctggcaaccaaacccatacatcgggattcctataataccttcgttggtctccctaacatgtaggtggcggaggggagatatacaatagaacagataccagacaagacataatgggctaaacaagactacaccaattacactgcctcattgatggtggtacataacgaactaatactgtagccctagacttgatagccatcatcatatcgaagtttcactaccctttttccatttgccatctattgaagtaataataggcgcatgcaacttcttttctttttttttcttttctctctcccccgttgttgtctcaccatatccgcaatgacaaaaaaatgatggaagacactaaaggaaaaaattaacgacaaagacagcaccaacagatgtcgttgttccagagctgatgaggggtatctcgaagcacacgaaactttttccttccttcattcacgcacactactctctaatgagcaacggtatacggccttccttccagttacttgaatttgaaataaaaaaaagtttgctgtcttgctatcaagtataaatagacctgcaattattaatcttttgtttcctcgtcattgttctcgttccctttcttccttgtttctttttctgcacaatatttcaagctataccaagcatacaatcaactatctcatatacacatatgttatatccagagaaattccaaggcattggtatctccaacgcaaaggattggaagcatcctaaacttgttagtttcgaccccaaacctttcggtgaccatgacgttgatgttgagattgaagcatgtggaatatgtgggagcgattttcatattgcagtaggcaattggggccctgttccggaaaatcaaattttgggtcacgaaattattggtagggtagtgaaggtgggttcaaaatgtcacacgggtgttaagattggtgatagggttggtgtaggtgcccaagcattggcttgtttcgaatgcgaaagatgcaaaagtgataacgaacaatactgtaccaacgatcatgttctaacaatgtggactccttacaaagatggatacatatctcaaggtggatttgcatcacatgttagattgcatgagcattttgcaattcaaattccggagaatatcccatcacctttggctgcaccattattgtgtgggggaataacagtgtttagtcctttattgagaaacggttgtggacctggtaagcgtgtggggattgttggcataggtggtattggtcacatggggatattactagctaaggccatgggagccgaagtttatgcgttcagtagaggacactccaagcgtgaagacagtatgaagttaggggcggaccattatattgccatgttggaggataaaggctggaccgaacaatattcaaatgctcttgatctgttagttgtgtgtagttcttctcttagtaaagttaattttgactcgattgtgaaaataatgaagattggcggctccattgtttccattgctgctccagaagttaacgagaagctggtactaaaaccactgggtctgatgggggtatctatctcatcttctgctatcggttcaagaaaagaaatagaacagctattaaagctagtcagcgagaaaaatgtgaagatttgggtagagaagctacccataagcgaggagggtgtatctcacgcatttacgagaatggaatccggagatgttaagtacaggtttacacttgtagactatgacaagaaattccataagtgagcggccgcataacaatactgacagtactaaataattgcctacttggcttcacatacgttgcatacgtcgatatagataataatgataatgacagcaggattatcgtaatacgtaatagttgaaaatctcaaaaatgtgtgggtcattacgtaaataatgataggaatgggattcttctatttttcctttttccattctagcagccgtcgggaaaacgtggcatcctctctttcgggctcaattggagtcacgctgccgtgagcatcctctctttccatatctaacaactgagcacgtaaccaatggaaaagcatgagcttagcgttgctccaaaaaagtattggatggttaataccatttgtctgttctcttctgactttgactcctcaaaaaaaaaaaatctacaatcaacagatcgcttcaattacgccctcacaaaaacttttttccttcttcttcgcccacgttaaattttatccctcatgttgtctaacggatttctgcacttgatttattataaaaagacaaagacataatacttctctatcaatttcagttattgttcttccttgcgttattcttctgttcttctttttcttttgtcatatataaccataaccaagtaatacatattcaaactcgagatgtccaaagctacttataaagaaagggctgcaacccatccatccccagtggcagctaaactgtttaacataatgcacgaaaaacaaactaacttatgcgcatcattagatgtaagaactactaaagagctactggagttggttgaggctttaggtccaaaaatttgtttgttgaagacacatgttgacatattaacagatttttctatggagggtaccgttaagcctctgaaagcgttaagcgcgaaatataactttcttttatttgaagaccgtaagtttgctgatattggaaatactgttaagttgcaatatagcgcaggagtttatagaattgccgaatgggctgacattacgaatgcccacggtgttgtaggtcctggcattgtgtctggattgaaacaagcggcagaggaagtgactaaggaaccaagaggtttactaatgctggcggaattatcttgcaaaggctctctagccaccggtgaatatacaaaaggtactgtggatattgcaaagtctgataaggacttcgtaatcggttttattgcacaaagagatatgggaggtcgtgacgagggctacgattggttaattatgacaccaggcgtaggattagatgacaaaggcgatgcgttaggccaacagtatcgtacagtcgatgatgtcgtaagtaccggttctgatatcattattgtcgggagaggtttatttgccaagggccgtgatgcgaaagtggagggggaaagatataggaaggcaggttgggaggcttacttgagaagatgtggtcagcagaattaagctagcgcgatttaatctctaattattagttaaagttttataagcatttttatgtaacgaaaaataaattggttcatattattactgcactgtcacttaccatggaaagaccagacaagaagttgccgacagtctgttgaattggcctggttaggcttaagtctgggtccgcttctttacaaatttggagaatttctcttaaacgatatgtatattcttttcgttggaaaagatgtcttccaaaaaaaaaaccgatgaattagtggaaccaaggaaaaaaaaagaggtatccttgattaaggaacactgtttaaacagtgtggtttccaaaaccctgaaactgcattagtgtaatagaagactagacacctcgatacaaataatggttactcaattcaaaactgccagcgaattcaaaatgaagtgaagttcctatactttctagagaataggaacttctatagtgagtcgaataagggcgacacaaaatttattctaaatgcataataaatactgataacatcttatagtttgtattatattttgtattatcgttgacatgtataattttgatatcaaaaactgattttccctttattattttcgagatttattttcttaattctctttaacaaactagaaatattgtatatacaaaaaatcataaataatagatgaatagtttaattataggtgttcatcaatcgaaaaagcaacgtatcttatttaaagtgcgttgcttttttctcatttataaggttaaataattctcatatatcaagcaaagtgacaggcgcccttaaatattctgacaaatgctctttccctaaactccccccataaaaaaacccgccgaagcgggtttttacgttatttgcggattaacgattactcgttatcagaaccgcccagggggcccgagcttaagactggccgtcgttttacaacacagaaagagtttgtagaaacgcaaaaaggccatccgtcaggggccttctgcttagtttgatgcctggcagttccctactctcgccttccgcttcctcgctcactgactcgctgcgctcggtcgttcggctgcggcgagcggtatcagctcactcaaaggcggtaatacggttatccacagaatcaggggataacgcaggaaagaacatgtgagcaaaaggccagcaaaaggccaggaaccgtaaaaaggccgcgttgctggcgtttttccataggctccgcccccctgacgagcatcacaaaaatcgacgctcaagtcagaggtggcgaaacccgacaggactataaagataccaggcgtttccccctggaagctccctcgtgcgctctcctgttccgaccctgccgcttaccggatacctgtccgcctttctcccttcgggaagcgtggcgctttctcatagctcacgctgtaggtatctcagttcggtgtaggtcgttcgctccaagctgggctgtgtgcacgaaccccccgttcagcccgaccgctgcgccttatccggtaactatcgtcttgagtccaacccggtaagacacgacttatcgccactggcagcagccactggtaacaggattagcagagcgaggtatgtaggcggtgctacagagttcttgaagtggtgggctaactacggctacactagaagaacagtatttggtatctgcgctctgctgaagccagttaccttcggaaaaagagttggtagctcttgatccggcaaacaaaccaccgctggtagcggtggtttttttgtttgcaagcagcagattacgcgcagaaaaaaaggatctcaagaagatcctttgatcttttctacggggtctgacgctcagtggaacgacgcgcgcgtaactcacgttaagggattttggtcatgagcttgcgccgtcccgtcaagtcagcgtaatgctctgcttt

SEQ ID NO: 93 - DNA, 7513 bp, Artificial Sequence
  Plasmid pGV1999
tcgcgcgtttcggtgatgacggtgaaaacctctgacacatgcagctcccggagacggtcacagcttgtctgtaagcggatgccgggagcagacaagcccgtcagggcgcgtcagcgggtgttggcgggtgtcggggctggcttaactatgcggcatcagagcagattgtactgagagtgcaccataaattcccgttttaagagcttggtgagcgctaggagtcactgccaggtatcgtttgaacacggcattagtcagggaagtcataacacagtcctttcccgcaattttctttttctattactcttggcctcctctagtacactctatatttttttatgcctcggtaatgattttcatttttttttttcccctagcggatgactctttttttttcttagcgattggcattatcacataatgaattatacattatataaagtaatgtgatttcttcgaagaatatactaaaaaatgagcaggcaagataaacgaaggcaaagatgacagagcagaaagccctagtaaagcgtattacaaatgaaaccaagattcagattgcgatctctttaaagggtggtcccctagcgatagagcactcgatcttcccagaaaaagaggcagaagcagtagcagaacaggccacacaatcgcaagtgattaacgtccacacaggtatagggtttctggaccatatgatacatgctctggccaagcattccggctggtcgctaatcgttgagtgcattggtgacttacacatagacgaccatcacaccactgaagactgcgggattgctctcggtcaagcttttaaagaggccctaggggccgtgcgtggagtaaaaaggtttggatcaggatttgcgcctttggatgaggcactttccagagcggtggtagatctttcgaacaggccgtacgcagttgtcgaacttggtttgcaaagggagaaagtaggagatctctcttgcgagatgatcccgcattttcttgaaagctttgcagaggctagcagaattaccctccacgttgattgtctgcgaggcaagaatgatcatcaccgtagtgagagtgcgttcaaggctcttgcggttgccataagagaagccacctcgcccaatggtaccaacgatgttccctccaccaaaggtgttcttatgtagtgacaccgattatttaaagctgcagcatacgatatatatacatgtgtatatatgtatacctatgaatgtcagtaagtatgtatacgaacagtatgatactgaagatgacaaggtaatgcatcattctatacgtgtcattctgaacgaggcgcgctttccttttttctttttgctttttctttttttttctcttgaactcgacggatctatgcggtgtgaaataccgcacagatgcgtaaggagaaaataccgcatcaggaaattgtaaacgttaatattttgttaaaattcgcgttaaatttttgttaaatcagctcattttttaaccaataggccgaaatcggcaaaatcccttataaatcaaaagaatagaccgagatagggttgagtgttgttccagtttggaacaagagtccactattaaagaacgtggactccaacgtcaaagggcgaaaaaccgtctatcagggcgatggcccactacgtgaaccatcaccctaatcaagttttttggggtcgaggtgccgtaaagcactaaatcggaaccctaaagggagcccccgatttagagcttgacggggaaagccggcgaacgtggcgagaaaggaagggaagaaagcgaaaggagcgggcgctagggcgctggcaagtgtagcggtcacgctgcgcgtaaccaccacacccgccgcgcttaatgcgccgctacagggcgcgtcgcgccattcgccattcaggctgcgcaactgttgggaagggcgatcggtgcgggcctcttcgctattacgccagctggcgaaagggggatgtgctgcaaggcgattaagttgggtaacgccagggttttcccagtcacgacgttgtaaaacgacggccagtgagcgcgcgtaatacgactcactatagggcgaattgggtaccggccgcaaattaaagccttcgagcgtcccaaaaccttctcaagcaaggttttcagtataatgttacatgcgtacacgcgtctgtacagaaaaaaaagaaaaatttgaaatataaataacgttcttaatactaacataactataaaaaaataaatagggacctagacttcaggttgtctaactccttccttttcggttagagcggatgtggggggagggcgtgaatgtaagcgtgacataactaattacatgactcgagcggccgcggatcctcagttcaaatcagtaacaacccttgaccaattgccatgctcagtctcgccatattggattccattaatccattgtgcaacttctttggccaatggaccggtttgttcgccgggcaacaacggaatattaatttgttcgcctttccagccgatttccttaatgggagaaacaatcgcagcagtaccagaaccaaaggcttcaagtagttcaccgttcttggatctctcagtaacttcgcctatagtgaagtagcgttcactaatggtccattcacttggttcgagtctttctttagcaagatttaaaatggaatccctagtaacaccttccaaaatggtaccgtctagtggagcagtaactagttccttcttgcccgttttactatctttaaacacgaaaaaagcattcatggtgccgacttcagtaatgttgttatttggaccaaatagccataaattttgttggtaaccccttgaagcagcttgcaattgtggcaggacgcagggggcgtagtttgcacctagtttcttgtcaccacagcctcctggccaagctcttgtggcataatcagtggcttccagtctgaccgccttaaatccagttttgtaataaggacccacagggcagcaaatgacatatagcaaggctctatcaggcgtggaaacccctaaaccggccgtagtgccgattaatgtaggcctgatatataaagagtaaccttttccttcaggaactaagcacttatcttgctggatcagtttcccaattagggtaatcaactcttctgggtcgaacgttggcaaacagattctctgagcagacttattcatgcgcttcatattcatatctggacgaaacattgtaattttgttgtccaccgttctgtaagccttcatcccttcgaatagctcaaaagcataatggaaaaccaccgcggaagggtctaaagacagattttgataaggtttaatctctggggtaccccaccctttttcagctgtccattccgcagttaacatgtggtccgtgaagctcttgccaaacactaactcactgttcggttttggcttagatgcatgttgtgtggtagttatcttaactttggaggcgtctaggggtgccaaggtcatgtcgacaaacttagattagattgctatgctttctttctaatgagcaagaagtaaaaaaagttgtaatagaacaagaaaaatgaaactgaaacttgagaaattgaagaccgtttattaacttaaatatcaatgggaggtcatcgaaagagaaaaaaatcaaaaaaaaaattttcaagaaaaagaaacgtgataaaaatttttattgcctttttcgacgaagaaaaagaaacgaggcggtctcttttttcttttccaaacctttagtacgggtaattaacgacaccctagaggaagaaagaggggaaatttagtatgctgtgcttgggtgttttgaagtggtacggcgatgcgcggagtccgagaaaatctggaagagtaaaaaaggagtagaaacattttgaagctatgagctccagcttttgttccctttagtgagggttaattgcgcgcttggcgtaatcatggtcatagctgtttcctgtgtgaaattgttatccgctcacaattccacacaacataggagccggaagcataaagtgtaaagcctggggtgcctaatgagtgaggtaactcacattaattgcgttgcgctcactgcccgctttccagtcgggaaacctgtcgtgccagctgcattaatgaatcggccaacgcgcggggagaggcggtttgcgtattgggcgctcttccgcttcctcgctcactgactcgctgcgctcggtcgttcggctgcggcgagcggtatcagctcactcaaaggcggtaatacggttatccacagaatcaggggataacgcaggaaagaacatgtgagcaaaaggccagcaaaaggccaggaaccgtaaaaaggccgcgttgctggcgtttttccataggctccgcccccctgacgagcatcacaaaaatcgacgctcaagtcagaggtggcgaaacccgacaggactataaagataccaggcgtttccccctggaagctccctcgtgcgctctcctgttccgaccctgccgcttaccggatacctgtccgcctttctcccttcgggaagcgtggcgctttctcatagctcacgctgtaggtatctcagttcggtgtaggtcgttcgctccaagctgggctgtgtgcacgaaccccccgttcagcccgaccgctgcgccttatccggtaactatcgtcttgagtccaacccggtaagacacgacttatcgccactggcagcagccactggtaacaggattagcagagcgaggtatgtaggcggtgctacagagttcttgaagtggtggcctaactacggctacactagaaggacagtatttggtatctgcgctctgctgaagccagttaccttcggaaaaagagttggtagctcttgatccggcaaacaaaccaccgctggtagcggtggtttttttgtttgcaagcagcagattacgcgcagaaaaaaaggatctcaagaagatcctttgatcttttctacggggtctgacgctcagtggaacgaaaactcacgttaagggattttggtcatgagattatcaaaaaggatcttcacctagatccttttaaattaaaaatgaagttttaaatcaatctaaagtatatatgagtaaacttggtctgacagttaccaatgcttaatcagtgaggcacctatctcagcgatctgtctatttcgttcatccatagttgcctgactccccgtcgtgtagataactacgatacgggagggcttaccatctggccccagtgctgcaatgataccgcgagacccacgctcaccggctccagatttatcagcaataaaccagccagccggaagggccgagcgcagaagtggtcctgcaactttatccgcctccatccagtctattaattgttgccgggaagctagagtaagtagttcgccagttaatagtttgcgcaacgttgttgccattgctacaggcatcgtggtgtcacgctcgtcgtttggtatggcttcattcagctccggttcccaacgatcaaggcgagttacatgatcccccatgttgtgcaaaaaagcggttagctccttcggtcctccgatcgttgtcagaagtaagttggccgcagtgttatcactcatggttatggcagcactgcataattctcttactgtcatgccatccgtaagatgcttttctgtgactggtgagtactcaaccaagtcattctgagaatagtgtatgcggcgaccgagttgctcttgcccggcgtcaatacgggataataccgcgccacatagcagaactttaaaagtgctcatcattggaaaacgttcttcggggcgaaaactctcaaggatcttaccgctgttgagatccagttcgatgtaacccactcgtgcacccaactgatcttcagcatcttttactttcaccagcgtttctgggtgagcaaaaacaggaaggcaaaatgccgcaaaaaagggaataagggcgacacggaaatgttgaatactcatactcttcctttttcaatattattgaagcatttatcagggttattgtctcatgagcggatacatatttgaatgtatttagaaaaataaacaaataggggttccgcgcacatttccccgaaaagtgccacctgaacgaagcatctgtgcttcattttgtagaacaaaaatgcaacgcgagagcgctaatttttcaaacaaagaatctgagctgcatttttacagaacagaaatgcaacgcgaaagcgctattttaccaacgaagaatctgtgcttcatttttgtaaaacaaaaatgcaacgcgagagcgctaatttttcaaacaaagaatctgagctgcatttttacagaacagaaatgcaacgcgagagcgctattttaccaacaaagaatctatacttcttttttgttctacaaaaatgcatcccgagagcgctatttttctaacaaagcatcttagattactttttttctcctttgtgcgctctataatgcagtctcttgataactttttgcactgtaggtccgttaaggttagaagaaggctactttggtgtctattttctcttccataaaaaaagcctgactccacttcccgcgtttactgattactagcgaagctgcgggtgcattttttcaagataaaggcatccccgattatattctataccgatgtggattgcgcatactttgtgaacagaaagtgatagcgttgatgattcttcattggtcagaaaattatgaacggtttcttctattttgtctctatatactacgtataggaaatgtttacattttcgtattgttttcgattcactctatgaatagttcttactacaatttttttgtctaaagagtaatactagagataaacataaaaaatgtagaggtcgagtttagatgcaagttcaaggagcgaaaggtggatgggtaggttatatagggatatagcacagagatatatagcaaagagatacttttgagcaatgtttgtggaagcggtattcgcaatattttagtagctcgttacagtccggtgcgtttttggttttttgaaagtgcgtcttcagagcgcttttggttttcaaaagcgctctgaagttcctatactttctagagaataggaacttcggaataggaacttcaaagcgtttccgaaaacgagcgcttccgaaaatgcaacgcgagctgcgcacatacagctcactgttcacgtcgcacctatatctgcgtgttgcctgtatatatatatacatgagaagaacggcatagtgcgtgtttatgcttaaatgcgtacttatatgcgtctatttatgtaggatgaaaggtagtctagtacctcctgtgatattatcccattccatgcggggtatcgtatgcttccttcagcactaccctttagctgttctatatgctgccactcctcaattggattagtctcatccttcaatgctatcatttcctttgatattggatcatctaagaaaccattattatcatgacattaacctataaaaataggcgtatcacgaggccctttcgtc

SEQ ID NO: 94 - DNA, 9552 bp, Artificial Sequence
  Plasmid pGV1990
tagaaaaactcatcgagcatcaaatgaaactgcaatttattcatatcaggattatcaataccatatttttgaaaaagccgtttctgtaatgaaggagaaaactcaccgaggcagttccataggatggcaagatcctggtatcggtctgcgattccgactcgtccaacatcaatacaacctattaatttcccctcgtcaaaaataaggttatcaagtgagaaatcaccatgagtgacgactgaatccggtgagaatggcaaaagtttatgcatttctttccagacttgttcaacaggccagccattacgctcgtcatcaaaatcactcgcatcaaccaaaccgttattcattcgtgattgcgcctgagcgaggcgaaatacgcgatcgctgttaaaaggacaattacaaacaggaatcgagtgcaaccggcgcaggaacactgccagcgcatcaacaatattttcacctgaatcaggatattcttctaatacctggaacgctgtttttccggggatcgcagtggtgagtaaccatgcatcatcaggagtacggataaaatgcttgatggtcggaagtggcataaattccgtcagccagtttagtctgaccatctcatctgtaacatcattggcaacgctacctttgccatgtttcagaaacaactctggcgcatcgggcttcccatacaagcgatagattgtcgcacctgattgcccgacattatcgcgagcccatttatacccatataaatcagcatccatgttggaatttaatcgcggcctcgacgtttcccgttgaatatggctcatattcttcctttttcaatattattgaagcatttatcagggttattgtctcatgagcggatacatatttgaatgtatttagaaaaataaacaaataggggtcagtgttacaaccaattaaccaattctgaacattatcgcgagcccatttatacctgaatatggctcataacaccccttgtttgcctggcggcagtagcgcggtggtcccacctgaccccatgccgaactcagaagtgaaacgccgtagcgccgatggtagtgtggggactccccatgcgagagtagggaactgccaggcatcaaataaaacgaaaggctcagtcgaaagactgggcctttcgcccgggctaattagggggtgtcgcccttattcgactctatagtgaagttcctattctctagaaagtataggaacttctgaagtggggaagcaaggcagaaactaacttcttcttcatgtaataaacacaccccgcgtttatttacctatctctaaacttcaacaccttatatcataactaatatttcttgagataagcacactgcacccataccttccttaaaaacgtagcttccagtttttggtggttccggcttccttcccgattccgcccgctaaacgcatatttttgttgcctggtggcatttgcaaaatgcataacctatgcatttaaaagattatgtatgctcttctgacttttcgtgtgatgaggctcgtggaaaaaatgaataatttatgaatttgagaacaattttgtgttgttacggtattttactatggaataatcaatcaattgaggattttatgcaaatatcgtttgaatatttttccgaccctttgagtacttttcttcataattgcataatattgtccgctgcccctttttctgttagacggtgtcttgatctacttgctatcgttcaacaccaccttattttctaactattttttttttagctcatttgaatcagcttatggtgatggcacatttttgcataaacctagctgtcctcgttgaacataggaaaaaaaaatatataaacaaggctctttcactctccttgcaatcagatttgggtttgttccctttattttcatatttcttgtcatattcctttctcaattattattttctactcataacctcacgcaaaataacacagtcaaatcaatcaaagtcgacatgctttcactacgtcaatctataagatttttcaagccagccacaagaactttgtgtagctctagatatctgcttcagcaaaaacccgtggtgatgttgactaaagctacaaaagagcagaaatcattggtgaaaaataggggtgcagaacttgttgtggactgtttggtagaacagggcgtaacacatgtttttggtatcccaggtgcaaaaatcgacgccgtgtttgatgcattacaagacaagggtccagaaattattgttgctagacatgagcaaaatgccgcatttatggcgcaagctgtaggtaggcttacaggtaaacctggtgttgtcctagttacgtctggcccaggagcctccaatttagcaactggtctattgacagctaatactgagggagatcctgtagttgcgttagccggtaatgtaattagagctgataggcttaagagaactcaccagtctctagacaacgctgctttattccaaccgatcaccaagtactcagtagaggtacaagacgtaaagaatatacctgaagctgtgacaaacgcatttcgtatagcttctgctggtcaggctggtgccgcgtttgtttcttttcctcaagacgttgtcaatgaagtgaccaatactaaaaacgttagagcggttgcagcccctaaactaggtccagccgcagacgacgcaattagcgctgcaattgctaaaattcagacggcgaaactaccagtagtccttgtcggtatgaagggcggaagaccagaagcaataaaagctgttcgtaagttattgaagaaagtccaattacctttcgttgagacttaccaagcagcaggtactttatctagagatttagaggatcagtattttggaaggataggtctatttagaaaccaaccaggagatttactattagaacaagctgatgttgtacttactatcggttatgatcctatagagtatgacccaaagttttggaacataaatggggatagaacaattatacatctagacgagataatcgccgacatcgatcacgcttatcaaccagatttagaactaatcggagatatcccgtcaacaatcaatcatattgaacatgatgctgtaaaggttgagttcgctgaacgtgagcagaaaatcttatctgatctaaagcaatatatgcatgagggtgaacaagttccagcagactggaaatctgaccgtgcacatcctttggaaatcgttaaggaactaagaaatgcggtcgatgatcatgtgactgttacatgtgatatcggttcacatgcaatttggatgtcacgttattttaggagctacgaaccattaactttaatgatatctaacgggatgcaaactctgggggttgcacttccttgggctattggcgctagtttagttaagcccggtgagaaggtggtatcggtatcaggtgatggtggctttctgttttcggctatggaattagaaactgcagtccgtttaaaagctcccattgtgcatattgtctggaatgattctacttacgacatggttgcttttcaacagttgaagaaatacaatagaacttcggctgtagactttggtaacatcgatattgtgaaatatgctgagtcttttggcgcaacaggcctgagggtggaaagtccagatcagttagctgatgtgttgagacaagggatgaatgccgagggaccggtaatcatagatgtgccagttgactactcagacaatattaatttggcttctgataaacttcctaaagagtttggcgagctaatgaagaccaaagccttataaggatccataaaaaacacgctttttcagttcgagtttatcattatcaatactgccatttcaaagaatacgtaaataattaatagtagtgattttcctaactttatttagtcaaaaaattagccttttaattctgctgtaacccgtacatgcccaaaatagggggcgggttacacagaatatataacatcgtaggtgtctgggtgaacagtttattcctggcatccactaaatataatggagcccgctttttaagctggcatccagaaaaaaaaagaatcccagcaccaaaatattgttttcttcaccaaccatcagttcataggtccattctcttagcgcaactacagagaacaggggcacaaacaggcaaaaaacgggcacaacctcaatggagtgatgcaacctgcctggagtaaatgatgacacaaggcaattgacccacgcatgtatctatctcattttcttacaccttctattaccttctgctctctctgatttggaaaaagctgaaaaaaaaggttgaaaccagttccctgaaattattcccctacttgactaataagtatataaagacggtaggtattgattgtaattctgtaaatctatttcttaaacttcttaaattctacttttatagttagtcttttttttagttttaaaacaccaagaacttagtttcgaataaacacacataaacaaacaaaaagcttatgtatactgttggtgattatctgctggaccgtctgcatgaactgggtatcgaagaaatcttcggcgttccgggtgattacaatctgcagttcctggatcagatcatctctcataaagacatgaaatgggtgggtaacgctaacgaactgaacgcaagctacatggcagatggttatgcacgtaccaagaaagccgcggcatttctgaccactttcggtgttggcgaactgagcgccgtcaacggtctggcgggctcctacgccgaaaacctgccggtggtggagatcgtaggcagcccaacgagcaaagttcagaacgaaggtaaattcgtccaccacactctggctgacggcgatttcaaacacttcatgaaaatgcatgaacctgtgactgcggcacgtacgctgctgactgcagagaacgctactgtggaaatcgaccgcgttctgtctgcgctgctgaaagaacgcaaaccagtttacatcaacctgcctgtggatgttgcggcagctaaagcggaaaaaccgagcctgccgctgaagaaagaaaactccacttctaacactagcgaccaggaaatcctgaacaaaatccaggagtctctgaaaaacgcaaagaaaccaatcgtgatcaccggccacgaaatcatttcttttggtctggagaagaccgtgacccaattcatcagcaaaaccaaactgccgattaccaccctgaacttcggcaagtcctctgttgacgaggctctgccgtctttcctgggcatctacaacggtactctgagcgaaccgaacctgaaagaatttgttgaatctgcggacttcatcctgatgctgggcgttaaactgaccgactcttctaccggtgcattcactcaccatctgaacgaaaacaaaatgattagcctgaacatcgacgagggtaaaatcttcaacgagcgtatccagaacttcgacttcgaaagcctgatcagctctctgctggacctgtccgaaatcgagtataaaggcaaatacattgacaaaaagcaagaagatttcgtaccatctaacgcactgctgtcccaggatcgcctgtggcaggccgtggagaacctgacccagagcaatgaaaccatcgtggcggaacaaggtacgagctttttcggcgcgtcttctatctttctgaaatccaaaagccattttatcggtcagccgctgtggggtagcattggctatactttcccggcagcgctgggctctcagatcgctgataaagaatctcgtcatctgctgttcatcggtgacggttccctgcagctgaccgtacaggaactgggtctggcaattcgtgaaaagatcaacccgatttgcttcattattaacaatgacggctacaccgttgagcgtgagatccacggtccgaaccagtcttacaacgatatccctatgtggaactactctaaactgccggagtccttcggcgcaactgaggaccgtgttgtgtctaaaattgtgcgtaccgaaaacgaatttgtgagcgtgatgaaagaggcccaggccgatccgaaccgtatgtactggatcgaactgatcctggcgaaagaaggcgcaccgaaggtactgaagaaaatgggcaagctgtttgctgaacagaataaatcctaagcggcccagtattgttatgcggccgcataacaatactgacagtactaaataattgcctacttggcttcacatacgttgcatacgtcgatatagataataatgataatgacagcaggattatcgtaatacgtaatagttgaaaatctcaaaaatgtgtgggtcattacgtaaataatgataggaatgggattcttctatttttcctttttccattctagcagccgtcgggaaaacgtggcatcctctctttcgggctcaattggagtcacgctgccgtgagcatcctctctttccatatctaacaactgagcacgtaaccaatggaaaagcatgagcttagcgttgctccaaaaaagtattggatggttaataccatttgtctgttctcttctgactttgactcctcaaaaaaaaaaaatctacaatcaacagatcgcttcaattacgccctcacaaaaacttttttccttcttcttcgcccacgttaaattttatccctcatgttgtctaacggatttctgcacttgatttattataaaaagacaaagacataatacttctctatcaatttcagttattgttcttccttgcgttattcttctgttcttctttttcttttgtcatatataaccataaccaagtaatacatattcaaactcgagatgtccaaagctacttataaagaaagggctgcaacccatccatccccagtggcagctaaactgtttaacataatgcacgaaaaacaaactaacttatgcgcatcattagatgtaagaactactaaagagctactggagttggttgaggctttaggtccaaaaatttgtttgttgaagacacatgttgacatattaacagatttttctatggagggtaccgttaagcctctgaaagcgttaagcgcgaaatataactttcttttatttgaagaccgtaagtttgctgatattggaaatactgttaagttgcaatatagcgcaggagtttatagaattgccgaatgggctgacattacgaatgcccacggtgttgtaggtcctggcattgtgtctggattgaaacaagcggcagaggaagtgactaaggaaccaagaggtttactaatgctggcggaattatcttgcaaaggctctctagccaccggtgaatatacaaaaggtactgtggatattgcaaagtctgataaggacttcgtaatcggttttattgcacaaagagatatgggaggtcgtgacgagggctacgattggttaattatgacaccaggcgtaggattagatgacaaaggcgatgcgttaggccaacagtatcgtacagtcgatgatgtcgtaagtaccggttctgatatcattattgtcgggagaggtttatttgccaagggccgtgatgcgaaagtggagggggaaagatataggaaggcaggttgggaggcttacttgagaagatgtggtcagcagaattaagctagcgcgatttaatctctaattattagttaaagttttataagcatttttatgtaacgaaaaataaattggttcatattattactgcactgtcacttaccatggaaagaccagacaagaagttgccgacagtctgttgaattggcctggttaggcttaagtctgggtccgcttctttacaaatttggagaatttctcttaaacgatatgtatattcttttcgttggaaaagatgtcttccaaaaaaaaaaccgatgaattagtggaaccaaggaaaaaaaaagaggtatccttgattaaggaacactgtttaaacagtgtggtttccaaaaccctgaaactgcattagtgtaatagaagactagacacctcgatacaaataatggttactcaattcaaaactgccagcgaattcaaaatgaagtgaagttcctatactttctagagaataggaacttctatagtgagtcgaataagggcgacacaaaatttattctaaatgcataataaatactgataacatcttatagtttgtattatattttgtattatcgttgacatgtataattttgatatcaaaaactgattttccctttattattttcgagatttattttcttaattctctttaacaaactagaaatattgtatatacaaaaaatcataaataatagatgaatagtttaattataggtgttcatcaatcgaaaaagcaacgtatcttatttaaagtgcgttgcttttttctcatttataaggttaaataattctcatatatcaagcaaagtgacaggcgcccttaaatattctgacaaatgctctttccctaaactccccccataaaaaaacccgccgaagcgggtttttacgttatttgcggattaacgattactcgttatcagaaccgcccagggggcccgagcttaagactggccgtcgttttacaacacagaaagagtttgtagaaacgcaaaaaggccatccgtcaggggccttctgcttagtttgatgcctggcagttccctactctcgccttccgcttcctcgctcactgactcgctgcgctcggtcgttcggctgcggcgagcggtatcagctcactcaaaggcggtaatacggttatccacagaatcaggggataacgcaggaaagaacatgtgagcaaaaggccagcaaaaggccaggaaccgtaaaaaggccgcgttgctggcgtttttccataggctccgcccccctgacgagcatcacaaaaatcgacgctcaagtcagaggtggcgaaacccgacaggactataaagataccaggcgtttccccctggaagctccctcgtgcgctctcctgttccgaccctgccgcttaccggatacctgtccgcctttctcccttcgggaagcgtggcgctttctcatagctcacgctgtaggtatctcagttcggtgtaggtcgttcgctccaagctgggctgtgtgcacgaaccccccgttcagcccgaccgctgcgccttatccggtaactatcgtcttgagtccaacccggtaagacacgacttatcgccactggcagcagccactggtaacaggattagcagagcgaggtatgtaggcggtgctacagagttcttgaagtggtgggctaactacggctacactagaagaacagtatttggtatctgcgctctgctgaagccagttaccttcggaaaaagagttggtagctcttgatccggcaaacaaaccaccgctggtagcggtggtttttttgtttgcaagcagcagattacgcgcagaaaaaaaggatctcaagaagatcctttgatcttttctacggggtctgacgctcagtggaacgacgcgcgcgtaactcacgttaagggattttggtcatgagcttgcgccgtcccgtcaagtcagcgtaatgctctgcttt

SEQ ID NO: 95 - DNA, 7880 bp, Artificial Sequence
  Plasmid pGV2015
tagaaaaactcatcgagcatcaaatgaaactgcaatttattcatatcaggattatcaataccatatttttgaaaaagccgtttctgtaatgaaggagaaaactcaccgaggcagttccataggatggcaagatcctggtatcggtctgcgattccgactcgtccaacatcaatacaacctattaatttcccctcgtcaaaaataaggttatcaagtgagaaatcaccatgagtgacgactgaatccggtgagaatggcaaaagtttatgcatttctttccagacttgttcaacaggccagccattacgctcgtcatcaaaatcactcgcatcaaccaaaccgttattcattcgtgattgcgcctgagcgaggcgaaatacgcgatcgctgttaaaaggacaattacaaacaggaatcgagtgcaaccggcgcaggaacactgccagcgcatcaacaatattttcacctgaatcaggatattcttctaatacctggaacgctgtttttccggggatcgcagtggtgagtaaccatgcatcatcaggagtacggataaaatgcttgatggtcggaagtggcataaattccgtcagccagtttagtctgaccatctcatctgtaacatcattggcaacgctacctttgccatgtttcagaaacaactctggcgcatcgggcttcccatacaagcgatagattgtcgcacctgattgcccgacattatcgcgagcccatttatacccatataaatcagcatccatgttggaatttaatcgcggcctcgacgtttcccgttgaatatggctcatattcttcctttttcaatattattgaagcatttatcagggttattgtctcatgagcggatacatatttgaatgtatttagaaaaataaacaaataggggtcagtgttacaaccaattaaccaattctgaacattatcgcgagcccatttatacctgaatatggctcataacaccccttgtttgcctggcggcagtagcgcggtggtcccacctgaccccatgccgaactcagaagtgaaacgccgtagcgccgatggtagtgtggggactccccatgcgagagtagggaactgccaggcatcaaataaaacgaaaggctcagtcgaaagactgggcctttcgcccgggctaattagggggtgtcgcccttattcgactctatagtgaagttcctattctctagaaagtataggaacttctgaagtggggaagcaaggcagaaactaacttcttcttcatgtaataaacacaccccgcgtttatttacctatctctaaacttcaacaccttatatcataactaatatttcttgagataagcacactgcacccataccttccttaaaaacgtagcttccagtttttggtggttccggcttccttcccgattccgcccgctaaacgcatatttttgttgcctggtggcatttgcaaaatgcataacctatgcatttaaaagattatgtatgctcttctgacttttcgtgtgatgaggctcgtggaaaaaatgaataatttatgaatttgagaacaattttgtgttgttacggtattttactatggaataatcaatcaattgaggattttatgcaaatatcgtttgaatatttttccgaccctttgagtacttttcttcataattgcataatattgtccgctgcccctttttctgttagacggtgtcttgatctacttgctatcgttcaacaccaccttattttctaactattttttttttagctcatttgaatcagcttatggtgatggcacatttttgcataaacctagctgtcctcgttgaacataggaaaaaaaaatatataaacaaggctctttcactctccttgcaatcagatttgggtttgttccctttattttcatatttcttgtcatattcctttctcaattattattttctactcataacctcacgcaaaataacacagtcaaatcaatcaaagtcgacatgctttcactacgtcaatctataagatttttcaagccagccacaagaactttgtgtagctctagatatctgcttcagcaaaaacccgtggtgatgttgactaaagctacaaaagagcagaaatcattggtgaaaaataggggtgcagaacttgttgtggactgtttggtagaacagggcgtaacacatgtttttggtatcccaggtgcaaaaatcgacgccgtgtttgatgcattacaagacaagggtccagaaattattgttgctagacatgagcaaaatgccgcatttatggcgcaagctgtaggtaggcttacaggtaaacctggtgttgtcctagttacgtctggcccaggagcctccaatttagcaactggtctattgacagctaatactgagggagatcctgtagttgcgttagccggtaatgtaattagagctgataggcttaagagaactcaccagtctctagacaacgctgctttattccaaccgatcaccaagtactcagtagaggtacaagacgtaaagaatatacctgaagctgtgacaaacgcatttcgtatagcttctgctggtcaggctggtgccgcgtttgtttcttttcctcaagacgttgtcaatgaagtgaccaatactaaaaacgttagagcggttgcagcccctaaactaggtccagccgcagacgacgcaattagcgctgcaattgctaaaattcagacggcgaaactaccagtagtccttgtcggtatgaagggcggaagaccagaagcaataaaagctgttcgtaagttattgaagaaagtccaattacctttcgttgagacttaccaagcagcaggtactttatctagagatttagaggatcagtattttggaaggataggtctatttagaaaccaaccaggagatttactattagaacaagctgatgttgtacttactatcggttatgatcctatagagtatgacccaaagttttggaacataaatggggatagaacaattatacatctagacgagataatcgccgacatcgatcacgcttatcaaccagatttagaactaatcggagatatcccgtcaacaatcaatcatattgaacatgatgctgtaaaggttgagttcgctgaacgtgagcagaaaatcttatctgatctaaagcaatatatgcatgagggtgaacaagttccagcagactggaaatctgaccgtgcacatcctttggaaatcgttaaggaactaagaaatgcggtcgatgatcatgtgactgttacatgtgatatcggttcacatgcaatttggatgtcacgttattttaggagctacgaaccattaactttaatgatatctaacgggatgcaaactctgggggttgcacttccttgggctattggcgctagtttagttaagcccggtgagaaggtggtatcggtatcaggtgatggtggctttctgttttcggctatggaattagaaactgcagtccgtttaaaagctcccattgtgcatattgtctggaatgattctacttacgacatggttgcttttcaacagttgaagaaatacaatagaacttcggctgtagactttggtaacatcgatattgtgaaatatgctgagtcttttggcgcaacaggcctgagggtggaaagtccagatcagttagctgatgtgttgagacaagggatgaatgccgagggaccggtaatcatagatgtgccagttgactactcagacaatattaatttggcttctgataaacttcctaaagagtttggcgagctaatgaagaccaaagccttataaggatccataaaaaacacgctttttcagttcgagtttatcattatcaatactgccatttcaaagaatacgtaaataattaatagtagtgattttcctaactttatttagtcaaaaaattagccttttaattctgctgtaacccgtacatgcccaaaatagggggcgggttacacagaatatataacatcgtaggtgtctgggtgaacagtttattcctggcatccactaaatataatggagcccgctttttaagctggcatccagaaaaaaaaagaatcccagcaccaaaatattgttttcttcaccaaccatcagttcataggtccattctcttagcgcaactacagagaacaggggcacaaacaggcaaaaaacgggcacaacctcaatggagtgatgcaacctgcctggagtaaatgatgacacaaggcaattgacccacgcatgtatctatctcattttcttacaccttctattaccttctgctctctctgatttggaaaaagctgaaaaaaaaggttgaaaccagttccctgaaattattcccctacttgactaataagtatataaagacggtaggtattgattgtaattctgtaaatctatttcttaaacttcttaaattctacttttatagttagtcttttttttagttttaaaacaccaagaacttagtttcgaataaacacacataaacaaacaaaaagctgcataacaatactgacagtactaaataattgcctacttggcttcacatacgttgcatacgtcgatatagataataatgataatgacagcaggattatcgtaatacgtaatagttgaaaatctcaaaaatgtgtgggtcattacgtaaataatgataggaatgggattcttctatttttcctttttccattctagcagccgtcgggaaaacgtggcatcctctctttcgggctcaattggagtcacgctgccgtgagcatcctctctttccatatctaacaactgagcacgtaaccaatggaaaagcatgagcttagcgttgctccaaaaaagtattggatggttaataccatttgtctgttctcttctgactttgactcctcaaaaaaaaaaaatctacaatcaacagatcgcttcaattacgccctcacaaaaacttttttccttcttcttcgcccacgttaaattttatccctcatgttgtctaacggatttctgcacttgatttattataaaaagacaaagacataatacttctctatcaatttcagttattgttcttccttgcgttattcttctgttcttctttttcttttgtcatatataaccataaccaagtaatacatattcaaactcgagatgtccaaagctacttataaagaaagggctgcaacccatccatccccagtggcagctaaactgtttaacataatgcacgaaaaacaaactaacttatgcgcatcattagatgtaagaactactaaagagctactggagttggttgaggctttaggtccaaaaatttgtttgttgaagacacatgttgacatattaacagatttttctatggagggtaccgttaagcctctgaaagcgttaagcgcgaaatataactttcttttatttgaagaccgtaagtttgctgatattggaaatactgttaagttgcaatatagcgcaggagtttatagaattgccgaatgggctgacattacgaatgcccacggtgttgtaggtcctggcattgtgtctggattgaaacaagcggcagaggaagtgactaaggaaccaagaggtttactaatgctggcggaattatcttgcaaaggctctctagccaccggtgaatatacaaaaggtactgtggatattgcaaagtctgataaggacttcgtaatcggttttattgcacaaagagatatgggaggtcgtgacgagggctacgattggttaattatgacaccaggcgtaggattagatgacaaaggcgatgcgttaggccaacagtatcgtacagtcgatgatgtcgtaagtaccggttctgatatcattattgtcgggagaggtttatttgccaagggccgtgatgcgaaagtggagggggaaagatataggaaggcaggttgggaggcttacttgagaagatgtggtcagcagaattaagctagcgcgatttaatctctaattattagttaaagttttataagcatttttatgtaacgaaaaataaattggttcatattattactgcactgtcacttaccatggaaagaccagacaagaagttgccgacagtctgttgaattggcctggttaggcttaagtctgggtccgcttctttacaaatttggagaatttctcttaaacgatatgtatattcttttcgttggaaaagatgtcttccaaaaaaaaaaccgatgaattagtggaaccaaggaaaaaaaaagaggtatccttgattaaggaacactgtttaaacagtgtggtttccaaaaccctgaaactgcattagtgtaatagaagactagacacctcgatacaaataatggttactcaattcaaaactgccagcgaattcaaaatgaagtgaagttcctatactttctagagaataggaacttctatagtgagtcgaataagggcgacacaaaatttattctaaatgcataataaatactgataacatcttatagtttgtattatattttgtattatcgttgacatgtataattttgatatcaaaaactgattttccctttattattttcgagatttattttcttaattctctttaacaaactagaaatattgtatatacaaaaaatcataaataatagatgaatagtttaattataggtgttcatcaatcgaaaaagcaacgtatcttatttaaagtgcgttgcttttttctcatttataaggttaaataattctcatatatcaagcaaagtgacaggcgcccttaaatattctgacaaatgctctttccctaaactccccccataaaaaaacccgccgaagcgggtttttacgttatttgcggattaacgattactcgttatcagaaccgcccagggggcccgagcttaagactggccgtcgttttacaacacagaaagagtttgtagaaacgcaaaaaggccatccgtcaggggccttctgcttagtttgatgcctggcagttccctactctcgccttccgcttcctcgctcactgactcgctgcgctcggtcgttcggctgcggcgagcggtatcagctcactcaaaggcggtaatacggttatccacagaatcaggggataacgcaggaaagaacatgtgagcaaaaggccagcaaaaggccaggaaccgtaaaaaggccgcgttgctggcgtttttccataggctccgcccccctgacgagcatcacaaaaatcgacgctcaagtcagaggtggcgaaacccgacaggactataaagataccaggcgtttccccctggaagctccctcgtgcgctctcctgttccgaccctgccgcttaccggatacctgtccgcctttctcccttcgggaagcgtggcgctttctcatagctcacgctgtaggtatctcagttcggtgtaggtcgttcgctccaagctgggctgtgtgcacgaaccccccgttcagcccgaccgctgcgccttatccggtaactatcgtcttgagtccaacccggtaagacacgacttatcgccactggcagcagccactggtaacaggattagcagagcgaggtatgtaggcggtgctacagagttcttgaagtggtgggctaactacggctacactagaagaacagtatttggtatctgcgctctgctgaagccagttaccttcggaaaaagagttggtagctcttgatccggcaaacaaaccaccgctggtagcggtggtttttttgtttgcaagcagcagattacgcgcagaaaaaaaggatctcaagaagatcctttgatcttttctacggggtctgacgctcagtggaacgacgcgcgcgtaactcacgttaagggattttggtcatgagcttgcgccgtcccgtcaagtcagcgtaatgctctgcttt

SEQ ID NO: 96 - DNA, 3189 bp, Neurospora crassa
atggagtcccggattatcaatgaccctaaagcccagtcgtttcaacttgtccgccatgcttcggttatttcgtccattccgccctggttaccctctaagggttcatcagctacatactctaccggtgctactgctcctgtcccacccaccgtcccctataagcaacttacagttggcgtcccgcgcgaaacctaccccaatgaacgccgtgtggccttaactcctcaaaatgtcgcttttctgctcaagaaaggtttcggaaaggtccttgttgaaaaaggagctggtgccgaggccgagttccatgattctgcctacgcaacagctggtgcaacacttgtcgagtctgcttctgatgtatggaacaacgccgatatcgtactcaaggtccgcggtcccagtgttgctgaagcggaaatgctcaaagagggtcaaacgattattagcttcctccaaccggcccaaaacaagccgcttgtggaaaagcttgcctctcggaatgccactgtttttgccatggacatgatccctcgcatctctagggcacaggtctttgatgcgctgagcagcatggccaacatcgccggttacaaagcagttctggaagcctcaaatgtgtttggtcgatttcttacaggtcaggttacagcagctggaaagatcccaccttgcaaagtcttggtcattggtgccggcgttgctggattgagtgccattgccacggccagaagaatgggagctattgtccgcggtttcgatactcgctccgctgcgcgtgaacaggttcagtccctcggcgccgagttcatcgaagtcgaactccaggaagacggttctggtgctggaggttacgccaaggaaatgtcgccagagttcatcgcagccgaaatgaagctgttcacagagcaagcccaagaagttgacatgattatcactacggccttgattcccggcaagccagcgcccaagctcatcaccaaagccatggtcgagattatgaagcctggctctgtgattgttgatctggcggccgaggctggagggaattgcgaagtgactcagcccggaaagcttatcaactataaggatgttaagatcattggctacactgacctcccctctcgccttcccactcagtcttccaccttgtactcgaacaatatcaccaaatttctcctttcgatggcgccaaacaaccaggaatacggcattgaccttcaagacgaagttgtcaggggtgcaattgtcattaacaaggggaacatcctcccgccagcacctcgaccagcaccaccaccggcaccagcagcaaccccgaccacagctaaggaagcagaagtcgtggccctgacgccgttccagaaggcttcgcgtgaagtaggtcttgtcacaagtggtatgggcgctgctcttgcgttgggaaagctcactgggccattgttcatgggcaacgcctttaccttcgccttggcctcgcttatcggttaccgtgtggtatggggagtccaacctgcgctccacagcccgttaatgagcgtcaccaacgcaatctcaggcatggtgggagtgggcggtcttttcatcttgggcgggggctacctccctgaaaccattcctcaggctttcggcgctgcttccgtgcttctcgcatttgtcaatatctctggcgggtttgtcattaccaaacgaatgctcgatatgttccgtcgtgccactgaccctccggaatacccgtggctgtacgctgttcccgccgccttatttggaggtggcttcattgccgccgcggcttcaggtgcagctggtttggtccaggccggctacttagttagctccgtgctttgcatcacctcgctttcgtctctggcatctcaaacaaccgcacgcctgggaaacacgcttggtatgttgggtgtaggatctggggtccttgcttccctgcttgctgctggtttctcacccgaggtccttacacagttcggcggtttggctgcgattggtggtatcttgggtttgcttattgggaagcgcatcacacccaccgaccttccacagacagttgccgctctccattccgttgttggcttggccgctgtgctcaccagtatcggaagtgttatggctgatgtgaatcatattacgactcttcatctcgttaccgcctacctcggtgttcttattggtggtgtgacgttcactgggtcaatcgtggctttcttgaagcttgccgggaaaatgtcctccaagccaaccattttacctggccgacacctgattaactcgggtcttttggcttccaatgttgccaccatgggtgcctttgtcacaatggcccctggttctccagcaatcgctgccggtgctctagctgcaaacactgttctatcattcctcaagggctacaccacaaccgcggccattggcggtgccgacatgccggtggtcatcacagttttgaacgcttatagcggctttgctcttgttgctgaaggcttcatgttggataacccactacttaccacagtgggcgcactcatcggcgtatcaggctccatcctctcgtacatcatgtgcgtggccatgaaccgttcactcaccaacgttctattcggtggaatatctgctccaacaacgacagagtacaagatagaaggaagcataacgcagaccaatgtcgaagacacagccgaagccctaactaacgcagagacagtaataattgtcgtaggatatggcatggccgtagccaaagcgcagtacgccatatcagacattacccaaatgttgcgctccaagggcatcaaagtgcgcttcgccattcaccccgtggccggtcgcatgcctggtcagtgcaacgttcttctagcagaagctagcgtgccgtatgacattgtactggagatggatgagatcaacgatgactttggtgagacggatctcactcttgtcattggagcgaacgacactgtcaacccaattgccttggagccaggcagctctattgctggaatgcccgttttgcatgcttggaagagcaagcaggtcgtggtgatgaagagaggtttggctagtggatatgccgacgtaccgaatcctatgttctatatgccgggcacaaagatgctcttcggcgacgcaagagtcacaacagaagccatcaaagccgcaattgaggcccggcttaagtga

SEQ ID NO: 97 - DNA, 11928 bp, Artificial Sequence
  Plasmid pGV1876
tagaaaaactcatcgagcatcaaatgaaactgcaatttattcatatcaggattatcaataccatatttttgaaaaagccgtttctgtaatgaaggagaaaactcaccgaggcagttccataggatggcaagatcctggtatcggtctgcgattccgactcgtccaacatcaatacaacctattaatttcccctcgtcaaaaataaggttatcaagtgagaaatcaccatgagtgacgactgaatccggtgagaatggcaaaagtttatgcatttctttccagacttgttcaacaggccagccattacgctcgtcatcaaaatcactcgcatcaaccaaaccgttattcattcgtgattgcgcctgagcgaggcgaaatacgcgatcgctgttaaaaggacaattacaaacaggaatcgagtgcaaccggcgcaggaacactgccagcgcatcaacaatattttcacctgaatcaggatattcttctaatacctggaacgctgtttttccggggatcgcagtggtgagtaaccatgcatcatcaggagtacggataaaatgcttgatggtcggaagtggcataaattccgtcagccagtttagtctgaccatctcatctgtaacatcattggcaacgctacctttgccatgtttcagaaacaactctggcgcatcgggcttcccatacaagcgatagattgtcgcacctgattgcccgacattatcgcgagcccatttatacccatataaatcagcatccatgttggaatttaatcgcggcctcgacgtttcccgttgaatatggctcatattcttcctttttcaatattattgaagcatttatcagggttattgtctcatgagcggatacatatttgaatgtatttagaaaaataaacaaataggggtcagtgttacaaccaattaaccaattctgaacattatcgcgagcccatttatacctgaatatggctcataacaccccttgtttgcctggcggcagtagcgcggtggtcccacctgaccccatgccgaactcagaagtgaaacgccgtagcgccgatggtagtgtggggactccccatgcgagagtagggaactgccaggcatcaaataaaacgaaaggctcagtcgaaagactgggcctttcgcccgggctaattagggggtgtcgcccttattcgactctatagtgaagttcctattctctagaaagtataggaacttctgaagtggggaagcaaggcagaaactaacttcttcttcatgtaataaacacaccccgcgtttatttacctatctctaaacttcaacaccttatatcataactaatatttcttgagataagcacactgcacccataccttccttaaaaacgtagcttccagtttttggtggttccggcttccttcccgattccgcccgctaaacgcatatttttgttgcctggtggcatttgcaaaatgcataacctatgcatttaaaagattatgtatgctcttctgacttttcgtgtgatgaggctcgtggaaaaaatgaataatttatgaatttgagaacaattttgtgttgttacggtattttactatggaataatcaatcaattgaggattttatgcaaatatcgtttgaatatttttccgaccctttgagtacttttcttcataattgcataatattgtccgctgcccctttttctgttagacggtgtcttgatctacttgctatcgttcaacaccaccttattttctaactattttttttttagctcatttgaatcagcttatggtgatggcacatttttgcataaacctagctgtcctcgttgaacataggaaaaaaaaatatataaacaaggctctttcactctccttgcaatcagatttgggtttgttccctttattttcatatttcttgtcatattcctttctcaattattattttctactcataacctcacgcaaaataacacagtcaaatcaatcaaagtcgagatgctttcactacgtcaatctataagatttttcaagccagccacaagaactttgtgtagctctagatatctgcttatgttgactaaagctacaaaagagcagaaatcattggtgaaaaataggggtgcagaacttgttgtggactgtttggtagaacagggcgtaacacatgtttttggtatcccaggtgcaaaaatcgacgccgtgtttgatgcattacaagacaagggtccagaaattattgttgctagacatgagcaaaatgccgcatttatggcgcaagctgtaggtaggcttacaggtaaacctggtgttgtcctagttacgtctggcccaggagcctccaatttagcaactggtctattgacagctaatactgagggagatcctgtagttgcgttagccggtaatgtaattagagctgataggcttaagagaactcaccagtctctagacaacgctgctttattccaaccgatcaccaagtactcagtagaggtacaagacgtaaagaatatacctgaagctgtgacaaacgcatttcgtatagcttctgctggtcaggctggtgccgcgtttgtttcttttcctcaagacgttgtcaatgaagtgaccaatactaaaaacgttagagcggttgcagcccctaaactaggtccagccgcagacgacgcaattagcgctgcaattgctaaaattcagacggcgaaactaccagtagtccttgtcggtatgaagggcggaagaccagaagcaataaaagctgttcgtaagttattgaagaaagtccaattacctttcgttgagacttaccaagcagcaggtactttatctagagatttagaggatcagtattttggaaggataggtctatttagaaaccaaccaggagatttactattagaacaagctgatgttgtacttactatcggttatgatcctatagagtatgacccaaagttttggaacataaatggggatagaacaattatacatctagacgagataatcgccgacatcgatcacgcttatcaaccagatttagaactaatcggagatatcccgtcaacaatcaatcatattgaacatgatgctgtaaaggttgagttcgctgaacgtgagcagaaaatcttatctgatctaaagcaatatatgcatgagggtgaacaagttccagcagactggaaatctgaccgtgcacatcctttggaaatcgttaaggaactaagaaatgcggtcgatgatcatgtgactgttacatgtgatatcggttcacatgcaatttggatgtcacgttattttaggagctacgaaccattaactttaatgatatctaacgggatgcaaactctgggggttgcacttccttgggctattggcgctagtttagttaagcccggtgagaaggtggtatcggtatcaggtgatggtggctttctgttttcggctatggaattagaaactgcagtccgtttaaaagctcccattgtgcatattgtctggaatgattctacttacgacatggttgcttttcaacagttgaagaaatacaatagaacttcggctgtagactttggtaacatcgatattgtgaaatatgctgagtcttttggcgcaacaggcctgagggtggaaagtccagatcagttagctgatgtgttgagacaagggatgaatgccgagggaccggtaatcatagatgtgccagttgactactcagacaatattaatttggcttctgataaacttcctaaagagtttggcgagctaatgaagaccaaagccttataaggatccataaaaaacacgctttttcagttcgagtttatcattatcaatactgccatttcaaagaatacgtaaataattaatagtagtgattttcctaactttatttagtcaaaaaattagccttttaattctgctgtaacccgtacatgcccaaaatagggggcgggttacacagaatatataacatcgtaggtgtctgggtgaacagtttattcctggcatccactaaatataatggagcccgctttttaagctggcatccagaaaaaaaaagaatcccagcaccaaaatattgttttcttcaccaaccatcagttcataggtccattctcttagcgcaactacagagaacaggggcacaaacaggcaaaaaacgggcacaacctcaatggagtgatgcaacctgcctggagtaaatgatgacacaaggcaattgacccacgcatgtatctatctcattttcttacaccttctattaccttctgctctctctgatttggaaaaagctgaaaaaaaaggttgaaaccagttccctgaaattattcccctacttgactaataagtatataaagacggtaggtattgattgtaattctgtaaatctatttcttaaacttcttaaattctacttttatagttagtcttttttttagttttaaaacaccaagaacttagtttcgaataaacacacataaacaaacaaaaagcttatggcacctgttacaattgaaaagttcgtaaatcaagaagaacgacaccttgtttccaaccgatcagcaacaattccgtttggtgaatacatatttaaaagattgttgtccatcgatacgaaatcagttttcggtgttcctggtgacttcaacttatctctattagaatatctctattcacctagtgttgaatcagctggcctaagatgggtcggcacgtgtaatgaactgaacgccgcttatgcggccgacggatattcccgttactctaataagattggctgtttaataaccacgtatggcgttggtgaattaagcgccttgaacggtatagccggttcgttcgctgaaaatgtcaaagttttgcacattgttggtgtggccaagtccatagattcgcgttcaagtaactttagtgatcggaacctacatcatttggtcccacagctacatgattcaaattttaaagggccaaatcataaagtatatcatgatatggtaaaagatagagtcgcttgctcggtagcctacttggaggatattgaaactgcatgtgaccaagtcgataatgttatccgcgatatttacaagtattctaaacctggttatatttttgttcctgcagattttgcggatatgtctgttacatgtgataatttggttaatgttccacgtatatctcaacaagattgtatagtatacccttctgaaaaccaattgtctgacataatcaacaagattactagttggatatattccagtaaaacacctgcgatccttggagacgtactgactgataggtatggtgtgagtaactttttgaacaagcttatctgcaaaactgggatttggaatttttccactgttatgggaaaatctgtaattgatgagtcaaacccaacttatatgggtcaatataatggtaaagaaggtttaaaacaagtctatgaacattttgaactgtgcgacttggtcttgcattttggagtcgacatcaatgaaattaataatgggcattatacttttacttataaaccaaatgctaaaatcattcaatttcatccgaattatattcgccttgtggacactaggcagggcaatgagcaaatgttcaaaggaatcaattttgcccctattttaaaagaactatacaagcgcattgacgtttctaaactttctttgcaatatgattcaaatgtaactcaatatacgaacgaaacaatgcggttagaagatcctaccaatggacaatcaagcattattacacaagttcacttacaaaagacgatgcctaaatttttgaaccctggtgatgttgtcgtttgtgaaacaggctcttttcaattctctgttcgtgatttcgcgtttccttcgcaattaaaatatatatcgcaaggatttttcctttccattggcatggcccttcctgccgccctaggtgttggaattgccatgcaagaccactcaaacgctcacatcaatggtggcaacgtaaaagaggactataagccaagattaattttgtttgaaggtgacggtgcagcacagatgacaatccaagaactgagcaccattctgaagtgcaatattccactagaagttatcatttggaacaataacggctacactattgaaagagccatcatgggccctaccaggtcgtataacgacgttatgtcttggaaatggaccaaactatttgaagcattcggagacttcgacggaaagtatactaatagcactctcattcaatgtccctctaaattagcactgaaattggaggagcttaagaattcaaacaaaagaagcgggatagaacttttagaagtcaaattaggcgaattggatttccccgaacagctaaagtgcatggttgaagcagcggcacttaaaagaaataaaaaagtgacacatggttataatgtgcagcgatacaatcagttacgtaaaaattttggattttatagagcatattcttcactaagaggttgtaagagcgttttcagacgtatataggctaggtcatgtaattagttatgtcacgcttacattcacgccctccccccacatccgctctaaccgaaaaggaaggagttagacaacctgaagtctaggtccctatttatttttttatagttatgttagtattaagaacgttatttatatttcaaatttttcttttttttctgtacagacgcgtgtacgcatgtaacattatactgaaaaccttgcttgagaaggttttgggacgctcgaaggctttaatttgcgggtgtacaatatggacttcctcttttctggcaaccaaacccatacatcgggattcctataataccttcgttggtctccctaacatgtaggtggcggaggggagatatacaatagaacagataccagacaagacataatgggctaaacaagactacaccaattacactgcctcattgatggtggtacataacgaactaatactgtagccctagacttgatagccatcatcatatcgaagtttcactaccctttttccatttgccatctattgaagtaataataggcgcatgcaacttcttttctttttttttcttttctctctcccccgttgttgtctcaccatatccgcaatgacaaaaaaatgatggaagacactaaaggaaaaaattaacgacaaagacagcaccaacagatgtcgttgttccagagctgatgaggggtatctcgaagcacacgaaactttttccttccttcattcacgcacactactctctaatgagcaacggtatacggccttccttccagttacttgaatttgaaataaaaaaaagtttgctgtcttgctatcaagtataaatagacctgcaattattaatcttttgtttcctcgtcattgttctcgttccctttcttccttgtttctttttctgcacaatatttcaagctataccaagcatacaatcaactatctcatatacacatatgttatatccagagaaattccaaggcattggtatctccaacgcaaaggattggaagcatcctaaacttgttagtttcgaccccaaacctttcggtgaccatgacgttgatgttgagattgaagcatgtggaatatgtgggagcgattttcatattgcagtaggcaattggggccctgttccggaaaatcaaattttgggtcacgaaattattggtagggtagtgaaggtgggttcaaaatgtcacacgggtgttaagattggtgatagggttggtgtaggtgcccaagcattggcttgtttcgaatgcgaaagatgcaaaagtgataacgaacaatactgtaccaacgatcatgttctaacaatgtggactccttacaaagatggatacatatctcaaggtggatttgcatcacatgttagattgcatgagcattttgcaattcaaattccggagaatatcccatcacctttggctgcaccattattgtgtgggggaataacagtgtttagtcctttattgagaaacggttgtggacctggtaagcgtgtggggattgttggcataggtggtattggtcacatggggatattactagctaaggccatgggagccgaagtttatgcgttcagtagaggacactccaagcgtgaagacagtatgaagttaggggcggaccattatattgccatgttggaggataaaggctggaccgaacaatattcaaatgctcttgatctgttagttgtgtgtagttcttctcttagtaaagttaattttgactcgattgtgaaaataatgaagattggcggctccattgtttccattgctgctccagaagttaacgagaagctggtactaaaaccactgggtctgatgggggtatctatctcatcttctgctatcggttcaagaaaagaaatagaacagctattaaagctagtcagcgagaaaaatgtgaagatttgggtagagaagctacccataagcgaggagggtgtatctcacgcatttacgagaatggaatccggagatgttaagtacaggtttacacttgtagactatgacaagaaattccataagtgagcggccgcataacaatactgacagtactaaataattgcctacttggcttcacatacgttgcatacgtcgatatagataataatgataatgacagcaggattatcgtaatacgtaatagttgaaaatctcaaaaatgtgtgggtcattacgtaaataatgataggaatgggattcttctatttttcctttttccattctagcagccgtcgggaaaacgtggcatcctctctttcgggctcaattggagtcacgctgccgtgagcatcctctctttccatatctaacaactgagcacgtaaccaatggaaaagcatgagcttagcgttgctccaaaaaagtattggatggttaataccatttgtctgttctcttctgactttgactcctcaaaaaaaaaaaatctacaatcaacagatcgcttcaattacgccctcacaaaaacttttttccttcttcttcgcccacgttaaattttatccctcatgttgtctaacggatttctgcacttgatttattataaaaagacaaagacataatacttctctatcaatttcagttattgttcttccttgcgttattcttctgttcttctttttcttttgtcatatataaccataaccaagtaatacatattcaaactcgagatgtccaaagctacttataaagaaagggctgcaacccatccatccccagtggcagctaaactgtttaacataatgcacgaaaaacaaactaacttatgcgcatcattagatgtaagaactactaaagagctactggagttggttgaggctttaggtccaaaaatttgtttgttgaagacacatgttgacatattaacagatttttctatggagggtaccgttaagcctctgaaagcgttaagcgcgaaatataactttcttttatttgaagaccgtaagtttgctgatattggaaatactgttaagttgcaatatagcgcaggagtttatagaattgccgaatgggctgacattacgaatgcccacggtgttgtaggtcctggcattgtgtctggattgaaacaagcggcagaggaagtgactaaggaaccaagaggtttactaatgctggcggaattatcttgcaaaggctctctagccaccggtgaatatacaaaaggtactgtggatattgcaaagtctgataaggacttcgtaatcggttttattgcacaaagagatatgggaggtcgtgacgagggctacgattggttaattatgacaccaggcgtaggattagatgacaaaggcgatgcgttaggccaacagtatcgtacagtcgatgatgtcgtaagtaccggttctgatatcattattgtcgggagaggtttatttgccaagggccgtgatgcgaaagtggagggggaaagatataggaaggcaggttgggaggcttacttgagaagatgtggtcagcagaattaagctagcgcgatttaatctctaattattagttaaagttttataagcatttttatgtaacgaaaaataaattggttcatattattactgcactgtcacttaccatggaaagaccagacaagaagttgccgacagtctgttgaattggcctggttaggcttaagtctgggtccgcttctttacaaatttggagaatttctcttaaacgatatgtatattcttttcgttggaaaagatgtcttccaaaaaaaaaaccgatgaattagtggaaccaaggaaaaaaaaagaggtatccttgattaaggaacactgtttaaacagtgtggtttccaaaaccctgaaactgcattagtgtaatagaagactagacacctcgatacaaataatggttactcaattcaaaactgccagcgaattcaaaatgaagtgaagttcctatactttctagagaataggaacttctatagtgagtcgaataagggcgacacaaaatttattctaaatgcataataaatactgataacatcttatagtttgtattatattttgtattatcgttgacatgtataattttgatatcaaaaactgattttccctttattattttcgagatttattttcttaattctctttaacaaactagaaatattgtatatacaaaaaatcataaataatagatgaatagtttaattataggtgttcatcaatcgaaaaagcaacgtatcttatttaaagtgcgttgcttttttctcatttataaggttaaataattctcatatatcaagcaaagtgacaggcgcccttaaatattctgacaaatgctctttccctaaactccccccataaaaaaacccgccgaagcgggtttttacgttatttgcggattaacgattactcgttatcagaaccgcccagggggcccgagcttaagactggccgtcgttttacaacacagaaagagtttgtagaaacgcaaaaaggccatccgtcaggggccttctgcttagtttgatgcctggcagttccctactctcgccttccgcttcctcgctcactgactcgctgcgctcggtcgttcggctgcggcgagcggtatcagctcactcaaaggcggtaatacggttatccacagaatcaggggataacgcaggaaagaacatgtgagcaaaaggccagcaaaaggccaggaaccgtaaaaaggccgcgttgctggcgtttttccataggctccgcccccctgacgagcatcacaaaaatcgacgctcaagtcagaggtggcgaaacccgacaggactataaagataccaggcgtttccccctggaagctccctcgtgcgctctcctgttccgaccctgccgcttaccggatacctgtccgcctttctcccttcgggaagcgtggcgctttctcatagctcacgctgtaggtatctcagttcggtgtaggtcgttcgctccaagctgggctgtgtgcacgaaccccccgttcagcccgaccgctgcgccttatccggtaactatcgtcttgagtccaacccggtaagacacgacttatcgccactggcagcagccactggtaacaggattagcagagcgaggtatgtaggcggtgctacagagttcttgaagtggtgggctaactacggctacactagaagaacagtatttggtatctgcgctctgctgaagccagttaccttcggaaaaagagttggtagctcttgatccggcaaacaaaccaccgctggtagcggtggtttttttgtttgcaagcagcagattacgcgcagaaaaaaaggatctcaagaagatcctttgatcttttctacggggtctgacgctcagtggaacgacgcgcgcgtaactcacgttaagggattttggtcatgagcttgcgccgtcccgtcaagtcagcgtaatgctctgcttt

SEQ ID NO: 98 - DNA, 7688 bp, Artificial Sequence
  Plasmid pGV2212
gacgaaagggcctcgtgatacgcctatttttataggttaatgtcatgataataatggtttcttaatatgatccaatatcaaaggaaatgatagcattgaaggatgagactaatccaattgaggagtggcagcatatagaacagctaaagggtagtgctgaaggaagcatacgataccccgcatggaatgggataatatcacaggaggtactagactacctttcatcctacataaatagacgcatataagtacgcatttaagcataaacacgcactatgccgttcttctcatgtatatatatatacaggcaacacgcagatataggtgcgacgtgaacagtgagctgtatgtgcgcagctcgcgttgcattttcggaagcgctcgttttcggaaacgctttgaagttcctattccgaagttcctattctctagaaagtataggaacttcagagcgcttttgaaaaccaaaagcgctctgaagacgcactttcaaaaaaccaaaaacgcaccggactgtaacgagctactaaaatattgcgaataccgcttccacaaacattgctcaaaagtatctctttgctatatatctctgtgctatatccctatataacctacccatccacctttcgctccttgaacttgcatctaaactcgacctctacattttttatgtttatctctagtattactctttagacaaaaaaattgtagtaagaactattcatagagtgaatcgaaaacaatacgaaaatgtaaacatttcctatacgtagtatatagagacaaaatagaagaaaccgttcataattttctgaccaatgaagaatcatcaacgctatcactttctgttcacaaagtatgcgcaatccacatcggtatagaatataatcggggatgcctttatcttgaaaaaatgcacccgcagcttcgctagtaatcagtaaacgcgggaagtggagtcaggctttttttatggaagagaaaatagacaccaaagtagccttcttctaaccttaacggacctacagtgcaaaaagttatcaagagactgcattatagagcgcacaaaggagaaaaaaagtaatctaagatgctttgttagaaaaatagcgctctcgggatgcatttttgtagaacaaaaaagaagtatagattctttgttggtaaaatagcgctctcgcgttgcatttctgttctgtaaaaatgcagctcagattctttgtttgaaaaattagcgctctcgcgttgcatttttgttttacaaaaatgaagcacagattcttcgttggtaaaatagcgctttcgcgttgcatttctgttctgtaaaaatgcagctcagattctttgtttgaaaaattagcgctctcgcgttgcatttttgttctacaaaatgaagcacagatgcttcgttcaggtggcacttttcggggaaatgtgcgcggaacccctatttgtttatttttctaaatacattcaaatatgtatccgctcatgagacaataaccctgataaatgcttcaataatattgaaaaaggaagagtatgagtattcaacatttccgtgtcgcccttattcccttttttgcggcattttgccttcctgtttttgctcacccagaaacgctggtgaaagtaaaagatgctgaagatcagttgggtgcacgagtgggttacatcgaactggatctcaacagcggtaagatccttgagagttttcgccccgaagaacgttttccaatgatgagcacttttaaagttctgctatgtggcgcggtattatcccgtattgacgccgggcaagagcaactcggtcgccgcatacactattctcagaatgacttggttgagtactcaccagtcacagaaaagcatcttacggatggcatgacagtaagagaattatgcagtgctgccataaccatgagtgataacactgcggccaacttacttctgacaacgatcggaggaccgaaggagctaaccgcttttttgcacaacatgggggatcatgtaactcgccttgatcgttgggaaccggagctgaatgaagccataccaaacgacgagcgtgacaccacgatgcctgtagcaatggcaacaacgttgcgcaaactattaactggcgaactacttactctagcttcccggcaacaattaatagactggatggaggcggataaagttgcaggaccacttctgcgctcggcccttccggctggctggtttattgctgataaatctggagccggtgagcgtgggtctcgcggtatcattgcagcactggggccagatggtaagccctcccgtatcgtagttatctacacgacggggagtcaggcaactatggatgaacgaaatagacagatcgctgagataggtgcctcactgattaagcattggtaactgtcagaccaagtttactcatatatactttagattgatttaaaacttcatttttaatttaaaaggatctaggtgaagatcctttttgataatctcatgaccaaaatcccttaacgtgagttttcgttccactgagcgtcagaccccgtagaaaagatcaaaggatcttcttgagatcctttttttctgcgcgtaatctgctgcttgcaaacaaaaaaaccaccgctaccagcggtggtttgtttgccggatcaagagctaccaactctttttccgaaggtaactggcttcagcagagcgcagataccaaatactgtccttctagtgtagccgtagttaggccaccacttcaagaactctgtagcaccgcctacatacctcgctctgctaatcctgttaccagtggctgctgccagtggcgataagtcgtgtcttaccgggttggactcaagacgatagttaccggataaggcgcagcggtcgggctgaacggggggttcgtgcacacagcccagcttggagcgaacgacctacaccgaactgagatacctacagcgtgagctatgagaaagcgccacgcttcccgaagggagaaaggcggacaggtatccggtaagcggcagggtcggaacaggagagcgcacgagggagcttccagggggaaacgcctggtatctttatagtcctgtcgggtttcgccacctctgacttgagcgtcgatttttgtgatgctcgtcaggggggcggagcctatggaaaaacgccagcaacgcggcctttttacggttcctggccttttgctggccttttgctcacatgttctttcctgcgttatcccctgattctgtggataaccgtattaccgcctttgagtgagctgataccgctcgccgcagccgaacgaccgagcgcagcgagtcagtgagcgaggaagcggaagagcgcccaatacgcaaaccgcctctccccgcgcgttggccgattcattaatgcagctggcacgacaggtttcccgactggaaagcgggcagtgagcgcaacgcaattaatgtgagttacctcactcattaggcaccccaggctttacactttatgcttccggctcctatgttgtgtggaattgtgagcggataacaatttcacacaggaaacagctatgaccatgattacgccaagcgcgcaattaaccctcactaaagggaacaaaagctggagctcagtttatcattatcaatactcgccatttcaaagaatacgtaaataattaatagtagtgattttcctaactttatttagtcaaaaaattagccttttaattctgctgtaacccgtacatgcccaaaatagggggcgggttacacagaatatataacatcgtaggtgtctgggtgaacagtttattcctggcatccactaaatataatggagcccgctttttaagctggcatccagaaaaaaaaagaatcccagcaccaaaatattgttttcttcaccaaccatcagttcataggtccattctcttagcgcaactacagagaacaggggcacaaacaggcaaaaaacgggcacaacctcaatggagtgatgcaacctgcctggagtaaatgatgacacaaggcaattgacccacgcatgtatctatctcattttcttacaccttctattaccttctgctctctctgatttggaaaaagctgaaaaaaaaggttgaaaccagttccctgaaattattcccctacttgactaataagtatataaagacggtaggtattgattgtaattctgtaaatctatttcttaaacttcttaaattctacttttatagttagtcttttttttagttttaaaacaccagaacttagtttcgacggattctagaactagcatggaacaaaaactcatctcagaagaagatggtgtcgacgaattcccgggatccatgttgcagagacattccttgaagttggggaaattctccatcagaacactcgctactggtgccccattagatgcatccaaactaaaaattactagaaacccaaatccatccaagccaagaccaaatgaagaattagtgttcggccagacattcaccgatcatatgttgaccattccttggtcagccaaagaagggtggggcactccacacatcaagccttacggtaatctttctcttgacccatctgcttgtgtattccattatgcatttgaattatttgaaggtttgaaagcctacagaactcctcaaaatactatcaccatgttccgtccggataagaacatggcccgtatgaacaagtctgccgctagaatttgtttgccaactttcgaatctgaagaattgatcaaacttaccgggaaattgatcgaacaagataaacacttggttcctcaaggtaatggttactcattatacatcagaccaacaatgattggtacatccaagggtttaggtgttggcactccctccgaggctcttctttatgttattacttctccagtcggtccttattataagactggtttcaaagccgtacgtcttgaagcaacagactatgctacaagagcttggccaggtggtgttggcgacaaaaaattgggtgctaactatgccccatgcatcttacctcaactacaagctgccaaaagagggtaccaacaaaatctatggttgttcggcccagaaaagaacatcactgaggttggtactatgaacgtgttcttcgttttcctcaacaaagtcactggcaagaaggaattggttaccgctccattagatggtaccattttagaaggtgttaccagagactctgttttaacattggctcgtgacaaactagatcctcaagaatgggacatcaacgagcgttattacactattactgaagtcgccactagagcaaaacaaggtgaactattagaagccttcggttctggtactgctgctgtcgtttcacctatcaaggaaattggctggaacaacgaagatattcatgttccactattgcctggtgaacaatgtggtgcattgaccaagcaagttgctcaatggattgctgatatccaatacggtagagtcaattatggtaactggtcaaaaactgttgccgacttgaactaagcggccgctcgagtcatgtaattagttatgtcacgcttacattcacgccctccccccacatccgctctaaccgaaaaggaaggagttagacaacctgaagtctaggtccctatttatttttttatagttatgttagtattaagaacgttatttatatttcaaatttttcttttttttctgtacagacgcgtgtacgcatgtaacattatactgaaaaccttgcttgagaaggttttgggacgctcgaaggctttaatttgcggccggtacccaattcgccctatagtgagtcgtattacgcgcgctcactggccgtcgttttacaacgtcgtgactgggaaaaccctggcgttacccaacttaatcgccttgcagcacatccccctttcgccagctggcgtaatagcgaagaggcccgcaccgatcgcccttcccaacagttgcgcagcctgaatggcgaatggcgcgacgcgccctgtagcggcgcattaagcgcggcgggtgtggtggttacgcgcagcgtgaccgctacacttgccagcgccctagcgcccgctcctttcgctttcttcccttcctttctcgccacgttcgccggctttccccgtcaagctctaaatcgggggctccctttagggttccgatttagtgctttacggcacctcgaccccaaaaaacttgattagggtgatggttcacgtagtgggccatcgccctgatagacggtttttcgccctttgacgttggagtccacgttctttaatagtggactcttgttccaaactggaacaacactcaaccctatctcggtctattcttttgatttataagggattttgccgatttcggcctattggttaaaaaatgagctgatttaacaaaaatttaacgcgaattttaacaaaatattaacgtttacaatttcctgatgcggtattttctccttacgcatctgtgcggtatttcacaccgcataggcaagtgcacaaacaatacttaaataaatactactcagtaataacctatttcttagcatttttgacgaaatttgctattttgttagagtcttttacaccatttgtctccacacctccgcttacatcaacaccaataacgccatttaatctaagcgcatcaccaacattttctggcgtcagtccaccagctaacataaaatgtaagctttcggggctctcttgccttccaacccagtcagaaatcgagttccaatccaaaagttcacctgtcccacctgcttctgaatcaaacaagggaataaacgaatgaggtttctgtgaagctgcactgagtagtatgttgcagtcttttggaaatacgagtcttttaataactggcaaaccgaggaactcttggtattcttgccacgactcatctccatgcagttggacgatatcaatgccgtaatcattgaccagagccaaaacatcctccttaggttgattacgaaacacgccaaccaagtatttcggagtgcctgaactatttttatatgcttttacaagacttgaaattttccttgcaataaccgggtcaattgttctctttctattgggcacacatataatacccagcaagtcagcatcggaatctagagcacattctgcggcctctgtgctctgcaagccgcaaactttcaccaatggaccagaactacctgtgaaattaataacagacatactccaagctgcctttgtgtgcttaatcacgtatactcacgtgctcaatagtcaccaatgccctccctcttggccctctccttttcttttttcgaccgaattaattcttaatcggcaaaaaaagaaaagctccggatcaagattgtacgtaaggtgacaagctatttttcaataaagaatatcttccactactgccatctggcgtcataactgcaaagtacacatatattacgatgctgtctattaaatgcttcctatattatatatatagtaatgtcgtttatggtgcactctcagtacaatctgctctgatgccgcatagttaagccagccccgacacccgccaacacccgctgacgcgccctgacgggcttgtctgctcccggcatccgcttacagacaagctgtgaccgtctccgggagctgcatgtgtcagaggttttcaccgtcatcaccgaaacgcgcga

SEQ ID NO: 99 - DNA, 33 bp, Artificial Sequence
  Primer #457
cagatcgtcgacatgaccttggcacccctagac

SEQ ID NO: 100 - DNA, 20 bp, Artificial Sequence
  Primer #393
atggaagatgttcaccgtgc

SEQ ID NO: 101 - DNA, 32 bp, Artificial Sequence
  Primer #395
ctcacaggatccgacgcaatgccattacactc

SEQ ID NO: 102 - DNA, 20 bp, Artificial Sequence
  Primer #1321
aatcatatcgaacacgatgc

SEQ ID NO: 103 - DNA, 20 bp, Artificial Sequence
  Primer #1322
tcagaaaggatcttctgctc

SEQ ID NO: 104 - DNA, 20 bp, Artificial Sequence
  Primer #1323
atcgatatcgtgaaatacgc

SEQ ID NO: 105 - DNA, 20 bp, Artificial Sequence
  Primer #1324
agctggtctggtgattctac

SEQ ID NO: 106 - DNA, 20 bp, Artificial Sequence
  Primer #1341
tgctgaaagagaaattgtcc

SEQ ID NO: 107 - DNA, 20 bp, Artificial Sequence
  Primer #1342
tttcttgttcgaagtccaag

SEQ ID NO: 108 - DNA, 20 bp, Artificial Sequence
  Primer #1436
aaatgacgacgagcctgaag

SEQ ID NO: 109 - DNA, 20 bp, Artificial Sequence
  Primer #1437
gacctgaccatttgatggag

SEQ ID NO: 110 - DNA, 21 bp, Artificial Sequence
  Primer #1439
caattggcgaagcagaacaag

SEQ ID NO: 111 - DNA, 21 bp, Artificial Sequence
  Primer #1440
atcgtacatcttccaagcatc

SEQ ID NO: 112 - DNA, 20 bp, Artificial Sequence
  Primer #1441
aatcggaaccctaaagggag

SEQ ID NO: 113 - DNA, 20 bp, Artificial Sequence
  Primer #1442
aatgggcaagctgtttgctg

SEQ ID NO: 114 - DNA, 20 bp, Artificial Sequence
  Primer #1443
tgcagatgcagatgtgagac

SEQ ID NO: 115 - DNA, 22 bp, Artificial Sequence
  Primer #1566
tcccacccaatcaaggccaacg

SEQ ID NO: 116 - DNA, 22 bp, Artificial Sequence
  Primer #1567
tccacctggtgccaatgaaccg

SEQ ID NO: 117 - DNA, 24 bp, Artificial Sequence
  Primer #1587
cggctgccagaactctactaactg

SEQ ID NO: 118 - DNA, 23 bp, Artificial Sequence
  Primer #1588
gcgacgtctactggcaggttaat

SEQ ID NO: 119 - DNA, 21 bp, Artificial Sequence
  Primer #1595
caacctggtgatttggggaag

SEQ ID NO: 120 - DNA, 20 bp, Artificial Sequence
  Primer #1597
gaatgatggcagattgggca

SEQ ID NO: 121 - DNA, 22 bp, Artificial Sequence
  Primer #1598
tattgtggggctgtctcgaatg

SEQ ID NO: 122 - DNA, 24 bp, Artificial Sequence
  Primer #1633
tccgtcactggattcaatgccatc

SEQ ID NO: 123 - DNA, 20 bp, Artificial Sequence
  Primer #1634
ttcgccagggagctggtgaa

SEQ ID NO: 124 - DNA, 20 bp, Artificial Sequence
  Primer #1671
cacatagagcaagcaagcag

SEQ ID NO: 125 - DNA, 20 bp, Artificial Sequence
  Primer #1672
cgtaagcagcgttcaattcg

SEQ ID NO: 126 - DNA, 42 bp, Artificial Sequence
  Primer #1673
cgaattgaacgctgcttacggtgaattcgagctcatagcttc

SEQ ID NO: 127 - DNA, 41 bp, Artificial Sequence
  Primer #1674
catttggacacctgggaaaggcttacgcaatgccattacac

SEQ ID NO: 128 - DNA, 20 bp, Artificial Sequence
  Primer #1675
ctttcccaggtgtccaaatg

SEQ ID NO: 129 - DNA, 20 bp, Artificial Sequence
  Primer #1676
gagcttgcttgaccaagttg

SEQ ID NO: 130 - DNA, 20 bp, Artificial Sequence
  Primer #1678
ctggcattgtgtctggattg

SEQ ID NO: 131 - DNA, 42 bp, Artificial Sequence
  Primer #1679
gagattaaatcgcgctagcttaattctgctgaccacatcttc

SEQ ID NO: 132 - DNA, 39 bp, Artificial Sequence
  Primer #1680
cagaattaagctagcgcgatttaatctctaattattagt

SEQ ID NO: 133 - DNA, 47 bp, Artificial Sequence
  Primer #1686
ctgaaaaagcgtgttttttatggatcctcagtgcttaccgcctgtac

SEQ ID NO: 134 - DNA, 47 bp, Artificial Sequence
  Primer #1687
gtacaggcggtaagcactgaggatccataaaaaacacgctttttcag

SEQ ID NO: 135 - DNA, 45 bp, Artificial Sequence
  Primer #1688
ttcaattgtaacaggtgccataagctttttgtttgtttatgtgtg

SEQ ID NO: 136 - DNA, 45 bp, Artificial Sequence
  Primer #1689
cacacataaacaaacaaaaagcttatggcacctgttacaattgaa

SEQ ID NO: 137 - DNA, 21 bp, Artificial Sequence
  Primer #1690
ataaaaaacacgctttttcag

SEQ ID NO: 138 - DNA, 25 bp, Artificial Sequence
  Primer #1691
tttgtttgtttatgtgtgtttattc

SEQ ID NO: 139 - DNA, 19 bp, Artificial Sequence
  Primer #1738
gccttctcgtcaaccaaga

SEQ ID NO: 140 - DNA, 23 bp, Artificial Sequence
  Primer #1739
cgtgaatgtaagcgtgacataac

SEQ ID NO: 141 - DNA, 28 bp, Artificial Sequence
  Primer #1740
aaatcatatgtgctaccatggtgcgttg

SEQ ID NO: 142 - DNA, 20 bp, Artificial Sequence
  Primer #1741
tcttggttgacgagaaggcg

SEQ ID NO: 143 - DNA, 42 bp, Artificial Sequence
  Primer #2038
cacataaacaaacaaaaagcttatgtatactgttggtgatta

SEQ ID NO: 144 - DNA, 40 bp, Artificial Sequence
  Primer #2039
cagtattgttatgcggccgcttaggatttattctgttcag

SEQ ID NO: 145 - DNA, 34 bp, Artificial Sequence
  Primer #2105
actagactcgagatgctttcactacgtcaatcta

SEQ ID NO: 146 - DNA, 33 bp, Artificial Sequence
  Primer #2106
atctgaggatccttataaggctttggtcttcat

SEQ ID NO: 147 - DNA, 31 bp, Artificial Sequence
  Primer #2305
ttgattggatccatgttgcagagacattcct

SEQ ID NO: 148 - DNA, 33 bp, Artificial Sequence
  Primer #2323
attgatgcggccgcttagttcaagtcggcaaca

SEQ ID NO: 149 - DNA, 1716 bp, Bacillus subtilis
atgttgactaaagctacaaaagagcagaaatcattggtgaaaaataggggtgcagaacttgttgtggactgtttggtagaacagggcgtaacacatgtttttggtatcccaggtgcaaaaatcgacgccgtgtttgatgcattacaagacaagggtccagaaattattgttgctagacatgagcaaaatgccgcatttatggcgcaagctgtaggtaggcttacaggtaaacctggtgttgtcctagttacgtctggcccaggagcctccaatttagcaactggtctattgacagctaatactgagggagatcctgtagttgcgttagccggtaatgtaattagagctgataggcttaagagaactcaccagtctctagacaacgctgctttattccaaccgatcaccaagtactcagtagaggtacaagacgtaaagaatatacctgaagctgtgacaaacgcatttcgtatagcttctgctggtcaggctggtgccgcgtttgtttcttttcctcaagacgttgtcaatgaagtgaccaatactaaaaacgttagagcggttgcagcccctaaactaggtccagccgcagacgacgcaattagcgctgcaattgctaaaattcagacggcgaaactaccagtagtccttgtcggtatgaagggcggaagaccagaagcaataaaagctgttcgtaagttattgaagaaagtccaattacctttcgttgagacttaccaagcagcaggtactttatctagagatttagaggatcagtattttggaaggataggtctatttagaaaccaaccaggagatttactattagaacaagctgatgttgtacttactatcggttatgatcctatagagtatgacccaaagttttggaacataaatggggatagaacaattatacatctagacgagataatcgccgacatcgatcacgcttatcaaccagatttagaactaatcggagatatcccgtcaacaatcaatcatattgaacatgatgctgtaaaggttgagttcgctgaacgtgagcagaaaatcttatctgatctaaagcaatatatgcatgagggtgaacaagttccagcagactggaaatctgaccgtgcacatcctttggaaatcgttaaggaactaagaaatgcggtcgatgatcatgtgactgttacatgtgatatcggttcacatgcaatttggatgtcacgttattttaggagctacgaaccattaactttaatgatatctaacgggatgcaaactctgggggttgcacttccttgggctattggcgctagtttagttaagcccggtgagaaggtggtatcggtatcaggtgatggtggctttctgttttcggctatggaattagaaactgcagtccgtttaaaagctcccattgtgcatattgtctggaatgattctacttacgacatggttgcttttcaacagttgaagaaatacaatagaacttcggctgtagactttggtaacatcgatattgtgaaatatgctgagtcttttggcgcaacaggcctgagggtggaaagtccagatcagttagctgatgtgttgagacaagggatgaatgccgagggaccggtaatcatagatgtgccagttgactactcagacaatattaatttggcttctgataaacttcctaaagagtttggcgagctaatgaagaccaaagccttataa

SEQ ID NO: 150 - protein, 571 aa, Bacillus subtilis
MLTKATKEQKSLVKNRGAELVVDCLVEQGVTHVFGIPGAKIDAVFDALQDKGPEIIVARHEQNAAFMAQAVGRLTGKPGVVLVTSGPGASNLATGLLTANTEGDPVVALAGNVIRADRLKRTHQSLDNAALFQPITKYSVEVQDVKNIPEAVTNAFRIASAGQAGAAFVSFPQDVVNEVTNTKNVRAVAAPKLGPAADDAISAAIAKIQTAKLPVVLVGMKGGRPEAIKAVRKLLKKVQLPFVETYQAAGTLSRDLEDQYFGRIGLFRNQPGDLLLEQADVVLTIGYDPIEYDPKFWNINGDRTIIHLDEIIADIDHAYQPDLELIGDIPSTINHIEHDAVKVEFAEREQKILSDLKQYMHEGEQVPADWKSDRAHPLEIVKELRNAVDDHVTVTCDIGSHAIWMSRYFRSYEPLTLMISNGMQTLGVALPWAIGASLVKPGEKVVSVSGDGGFLFSAMELETAVRLKAPIVHIVWNDSTYDMVAFQQLKKYNRTSAVDFGNIDIVKYAESFGATGLRVESPDQLADVLRQGMNAEGPVIIDVPVDYSDNINLASDKLPKEFGELMKTKAL

SEQ ID NO: 151 - DNA, 1716 bp, Bacillus subtilis
atgttgacaaaagcaacaaaagaacaaaaatcccttgtgaaaagcagaggggcggagcttgttgttgattgcttagcggagcaaggtgtcacacatgtatttggcattccaggtgcaaaaattgatgcggtatttgacgctttacaagataaagggcctgaaattatcgttgcccggcatgaacaaaatgcagcatttatggcgcaagcagtcggccgtttaactggaaaaccgggagtcgtgttagtcacatcaggaccaggtgcttcgaacttggcaacaggactgctgacagcaaacactgaaggtgaccctgtcgttgcgcttgctgggaacgtgatccgtgcagatcgtttaaaacggacacatcaatctttggataatgcggcgctattccagccgattacaaaatacagtgtagaagttcaagatgtaaaaaatataccggaagctgttacaaatgcgtttaggatagcgtcagcagggcaggctggggccgcttttgtgagttttccgcaagatgttgtgaatgaagtcacaaatacaaaaaacgtacgtgctgtcgcagcgccaaaacttggtcccgcagcagatgacgcaatcagtatggccattgcaaaaattcaaacagcaaaacttcctgtcgttttagtcggcatgaagggcggaagaccggaagcgattaaagcggttcgcaagctattgaaaaaagtgcagcttccattcgttgaaacatatcaagctgccggtactcttacgagagatttagaggatcagtattttggccggatcggtttattccgcaaccagcctggcgatctgctgcttgagcaggctgatgttgttctgacaatcggctatgacccaattgaatatgatccgaaattctggaatgtcaatggagaccggacgatcatccatttagacgagattctggctgacattgatcatgcttaccagccggatcttgaactgatcggtgatattccatctacgatcaatcatatcgaacacgatgctgtgaaagtagactttgcggaacgtgagcagaagatcctttctgatttaaaacaatatatgcatgagggtgagcaggtgcctgcagattggaaatcagacagagtgcatcctcttgaaatcgttaaagaattgcgaaacgcagtcgatgatcatgttacagtgacttgcgatatcggttcacacgcgatttggatgtcacgttatttccgcagctacgagccgttaacattaatgattagtaacggtatgcaaacactcggcgttgcgcttccttgggcaatcggcgcttcattggtgaaaccgggagaaaaagtagtatcagtctccggtgatggcggtttcttattctcagctatggaattagagacagcagttcgtttaaaagcaccaattgtacacattgtatggaacgacagcacatatgacatggttgcattccagcaattgaaaaaatataatcgtacatctgcggtcgatttcggaaatatcgatatcgtgaaatacgcggaaagcttcggagcaactggcttacgcgtagaatcaccagaccagctggcagatgttctgcgtcaaggcatgaacgctgaggggcctgtcatcattgatgtcccggttgactacagtgataacgttaatttagcaagtgacaagcttccgaaagaattcggggaactcatgaaaacgaaagctctctag

SEQ ID NO: 152 - protein, 571 aa, Bacillus subtilis
MLTKATKEQKSLVKSRGAELVVDCLAEQGVTHVFGIPGAKIDAVFDALQDKGPEIIVARHEQNAAFMAQAVGRLTGKPGVVLVTSGPGASNLATGLLTANTEGDPVVALAGNVIRADRLKRTHQSLDNAALFQPITKYSVEVQDVKNIPEAVTNAFRIASAGQAGAAFVSFPQDVVNEVTNTKNVRAVAAPKLGPAADDAISMAIAKIQTAKLPVVLVGMKGGRPEAIKAVRKLLKKVQLPFVETYQAAGTLTRDLEDQYFGRIGLFRNQPGDLLLEQADVVLTIGYDPIEYDPKFWNVNGDRTIIHLDEILADIDHAYQPDLELIGDIPSTINHIEHDAVKVDFAEREQKILSDLKQYMHEGEQVPADWKSDRVHPLEIVKELRNAVDDHVTVTCDIGSHAIWMSRYFRSYEPLTLMISNGMQTLGVALPWAIGASLVKPGEKVVSVSGDGGFLFSAMELETAVRLKAPIVHIVWNDSTYDMVAFQQLKKYNRTSAVDFGNIDIVKYAESFGATGLRVESPDQLADVLRQGMNAEGPVIIDVPVDYSDNVNLASDKLPKEFGELMKTKAL

SEQ ID NO: 153 - DNA, 1647 bp, Lactococcus lactis
atgtatactgttggagattatttgttagatagattgcatgaactaggcattgaagaaattttcggagttcccggggattacaatctgcaatttctagaccagattatttcacataaagacatgaaatgggtcggaaatgcaaatgagttaaatgcatcttacatggccgatggttatgccagaaccaaaaaggcggctgctttcttgactaccttcggggtgggtgaattatcggcagttaatggcttggctggatcatacgcagaaaacttgcctgtcgttgaaatcgttggctcgccaacatcaaaagttcaaaatgaaggaaaattcgtccaccacactttggcagatggtgacttcaagcacttcatgaaaatgcatgaacctgtaacggctgccagaactctactaactgctgagaatgcaactgtagagattgatcgtgtcttgagcgctcttttaaaggaaagaaagccagtctatattaacctgccagtagacgtcgcagcggccaaagcagagaagcctagcttaccacttaaaaaggaaaatagtacctcaaacacttcagatcaagagattcttaacaagatccaggaatctttgaaaaacgctaaaaagcccattgttataactggccatgagatcatatcatttggtttggagaaaacagtgacccagttcattagtaagacgaaactgccaataaccactctaaatttcggtaagtcctccgttgatgaagcgttgcctagcttcttgggtatttacaacggcaccttgtcagaacccaatctgaaagaatttgttgaatctgcagactttatattgatgttgggagtaaagttgactgacagctctactggtgcttttacacaccatctgaatgaaaacaagatgatatctcttaatatcgatgaaggtaagatattcaatgaaagaatacagaacttcgacttcgagagtctaatttcttccttactggacttaagtgaaatcgagtataaaggtaagtacattgacaaaaagcaggaagattttgttccgagcaacgcgctacttagtcaagatagattatggcaagctgttgaaaatctgacacaatccaatgagacaattgttgccgaacaaggtacctccttttttggcgcttcttccatcttcctaaagtccaagtctcatttcatagggcagccattgtggggtagcatcggttacacctttcctgctgctctagggtcccaaattgctgataaagaaagtagacatttgttgtttataggagacggatctttacaattgacagttcaagagttaggtttagccatcagagagaagattaatcctatctgcttcataataaacaacgatggctatacagttgagagggaaattcatggacctaatcaatcttataatgatataccaatgtggaattatagcaagttacctgaatcttttggggctaccgaggatcgtgttgtttctaagattgtaagaaccgaaaatgaatttgtttctgttatgaaggaagcacaagcggaccctaacaggatgtactggattgagttaattcttgctaaggagggtgcgccaaaggttctaaagaagatgggtaagttgttcgccgaacaaaacaaatcctaa

SEQ ID NO: 154 - protein, 548 aa, Lactococcus lactis
MYTVGDYLLDRLHELGIEEIFGVPGDYNLQFLDQIISHKDMKWVGNANELNASYMADGYARTKKAAAFLTTFGVGELSAVNGLAGSYAENLPVVEIVGSPTSKVQNEGKFVHHTLADGDFKHFMKMHEPVTAARTLLTAENATVEIDRVLSALLKERKPVYINLPVDVAAAKAEKPSLPLKKENSTSNTSDQEILNKIQESLKNAKKPIVITGHEIISFGLEKTVTQFISKTKLPITTLNFGKSSVDEALPSFLGIYNGTLSEPNLKEFVESADFILMLGVKLTDSSTGAFTHHLNENKMISLNIDEGKIFNERIQNFDFESLISSLLDLSEIEYKGKYIDKKQEDFVPSNALLSQDRLWQAVENLTQSNETIVAEQGTSFFGASSIFLKSKSHFIGQPLWGSIGYTFPAALGSQIADKESRHLLFIGDGSLQLTVQELGLAIREKINPICFIINNDGYTVEREIHGPNQSYNDIPMWNYSKLPESFGATEDRVVSKIVRTENEFVSVMKEAQADPNRMYWIELILAKEGAPKVLKKMGKLFAEQNKS

SEQ ID NO: 155 - DNA, 1647 bp, Lactococcus lactis
atgtatactgttggtgattatctgctggaccgtctgcatgaactgggtatcgaagaaatcttcggcgttccgggtgattacaatctgcagttcctggatcagatcatctctcataaagacatgaaatgggtgggtaacgctaacgaactgaacgcaagctacatggcagatggttatgcacgtaccaagaaagccgcggcatttctgaccactttcggtgttggcgaactgagcgccgtcaacggtctggcgggctcctacgccgaaaacctgccggtggtggagatcgtaggcagcccaacgagcaaagttcagaacgaaggtaaattcgtccaccacactctggctgacggcgatttcaaacacttcatgaaaatgcatgaacctgtgactgcggcacgtacgctgctgactgcagagaacgctactgtggaaatcgaccgcgttctgtctgcgctgctgaaagaacgcaaaccagtttacatcaacctgcctgtggatgttgcggcagctaaagcggaaaaaccgagcctgccgctgaagaaagaaaactccacttctaacactagcgaccaggaaatcctgaacaaaatccaggagtctctgaaaaacgcaaagaaaccaatcgtgatcaccggccacgaaatcatttcttttggtctggagaagaccgtgacccaattcatcagcaaaaccaaactgccgattaccaccctgaacttcggcaagtcctctgttgacgaggctctgccgtctttcctgggcatctacaacggtactctgagcgaaccgaacctgaaagaatttgttgaatctgcggacttcatcctgatgctgggcgttaaactgaccgactcttctaccggtgcattcactcaccatctgaacgaaaacaaaatgattagcctgaacatcgacgagggtaaaatcttcaacgagcgtatccagaacttcgacttcgaaagcctgatcagctctctgctggacctgtccgaaatcgagtataaaggcaaatacattgacaaaaagcaagaagatttcgtaccatctaacgcactgctgtcccaggatcgcctgtggcaggccgtggagaacctgacccagagcaatgaaaccatcgtggcggaacaaggtacgagctttttcggcgcgtcttctatctttctgaaatccaaaagccattttatcggtcagccgctgtggggtagcattggctatactttcccggcagcgctgggctctcagatcgctgataaagaatctcgtcatctgctgttcatcggtgacggttccctgcagctgaccgtacaggaactgggtctggcaattcgtgaaaagatcaacccgatttgcttcattattaacaatgacggctacaccgttgagcgtgagatccacggtccgaaccagtcttacaacgatatccctatgtggaactactctaaactgccggagtccttcggcgcaactgaggaccgtgttgtgtctaaaattgtgcgtaccgaaaacgaatttgtgagcgtgatgaaagaggcccaggccgatccgaaccgtatgtactggatcgaactgatcctggcgaaagaaggcgcaccgaaggtactgaagaaaatgggcaagctgtttgctgaacagaataaatcctaa

SEQ ID NO: 156 - protein, 548 aa, Lactococcus lactis; identical to SEQ ID NO: 154

SEQ ID NO: 157 - DNA, 1410 bp, Artificial Sequence
  E. coli EcilvCDeltaN nucleotide sequence
atgggccgcgatgaattcgccgatggcgcgagctaccttcagggtaaaaaagtagtcatcgtcggctgtggcgcacagggtctgaaccagggcctgaacatgcgtgattctggtctcgatatctcctacgctctgcgtaaagaagcgattgccgagaagcgcgcgtcctggcgtaaagcgaccgaaaatggttttaaagtgggtacttacgaagaactgatcccacaggcggatctggtgattaacctgacgccggacaagcagcactctgatgtagtgcgcaccgtacagccactgatgaaagacggcgcggcgctgggctactcgcacggtttcaacatcgtcgaagtgggcgagcagatccgtaaagatatcaccgtagtgatggttgcgccgaaatgcccaggcaccgaagtgcgtgaagagtacaaacgtgggttcggcgtaccgacgctgattgccgttcacccggaaaacgatccgaaaggcgaaggcatggcgattgccaaagcctgggcggctgcaaccggtggtcaccgtgcgggtgtgctggaatcgtccttcgttgcggaagtgaaatctgacctgatgggcgagcaaaccatcctgtgcggtatgttgcaggctggctctctgctgtgcttcgacaagctggtggaagaaggtaccgatccagcatacgcagaaaaactgattcagttcggttgggaaaccatcaccgaagcactgaaacagggcggcatcaccctgatgatggaccgtctctctaacccggcgaaactgcgtgcttatgcgctttctgaacagctgaaagagatcatggcacccctgttccagaaacatatggacgacatcatctccggcgaattctcttccggtatgatggcggactgggccaacgatgataagaaactgctgacctggcgtgaagagaccggcaaaaccgcgtttgaaaccgcgccgcagtatgaaggcaaaatcggcgagcaggagtacttcgataaaggcgtactgatgattgcgatggtgaaagcgggcgttgaactggcgttcgaaaccatggtcgattccggcatcattgaagagtctgcatattatgaatcactgcacgagctgccgctgattgccaacaccatcgcccgtaagcgtctgtacgaaatgaacgtggttatctctgataccgctgagtacggtaactatctgttctcttacgcttgtgtgccgttgctgaaaccgtttatggcagagctgcaaccgggcgacctgggtaaagctattccggaaggcgcggtagataacgggcaactgcgtgatgtgaacgaagcgattcgcagccatgcgattgagcaggtaggtaagaaactgcgcggctatatgacagatatgaaacgtattgctgttgcgggttaa

SEQ ID NO: 158 - DNA, 1782 bp, Artificial Sequence
  E. coli EcilvDDeltaNcoKl nucleotide sequence
atgactggcatgactgatgcagatttcggaaagccaatcattgccgtcgtcaactcttttacacaattcgttccgggtcatgtccatttgcgtgatctaggtaagcttgttgccgaacaaattgaagctgcaggtggtgtcgcaaaagagtttaatactattgctgtggacgacggtatagctatggggcatggcggtatgttatactctttaccatcgagagaattaattgcagactcagtcgaatatatggttaatgctcattgtgccgatgcaatggtttgtatctctaattgtgataagataacgcctggtatgttgatggcgtccttgagattgaacatcccagtaatcttcgtatctggcggcccaatggaggctggtaaaactaagttaagtgatcagatcatcaaacttgatcttgtggatgcaatgattcaaggtgcagatccaaaagtttcagactcgcagtcagaccaagttgaaagaagtgcatgtccaacttgtggttcttgcagtggaatgttcacggctaactctatgaattgcttgactgaagctctaggtttatctcaaccaggaaatggttcattattagcgacccatgcagacagaaagcaattgttcttaaatgccggaaaaagaattgtggaactaacgaaaaggtattacgaacaaaatgatgaatcagcattaccgaggaatatagcttcaaaggctgcattcgaaaatgccatgacattggatattgcaatgggtggtagtacaaacacggtcttacatcttctagctgcagcccaagaagctgagatagatttcaccatgtctgatatcgacaagctttcacgtaaggttccacagttatgtaaggttgcaccatcaactcaaaagtatcacatggaagacgttcatcgtgcaggaggggttattggtattttaggggagttggacagagccggtcttttaaacagggatgtgaagaatgtattgggtttaacacttccacagacattagagcaatacgatgtcatgttaactcaagatgatgccgtgaaaaacatgttcagggcaggtccagcagggatcagaaccacccaagcattctcgcaagactgtaggtgggacactttggacgatgatagagcaaatggatgtataagatcgcttgagcatgcttatagtaaggatggtggtttagcagtattatatggaaacttcgctgaaaatggttgcattgtgaaaactgctggtgtagatgatagtattttgaaatttactggacccgctaaagtttacgaaagtcaagacgatgctgttgaggctatacttggcggaaaggtggtagcaggagacgtggtagtgataagatatgagggaccaaagggaggaccaggtatgcaggaaatgctttacccaacttcatttttgaagtccatgggactaggaaaagcttgtgcccttatcactgacggtagattctctggtggcacttcgggtttaagtatcggtcacgtatcaccagaggcagcttctggtggttcgattggattgattgaagatggagatttgatcgccatagatatcccaaatagaggtatccaattacaagtctcagacgctgaattggctgcaagaagagaagcacaagatgccagaggagataaggcttggactcctaaaaatagagaacgtcaagtaagtttcgcccttagggcttatgcttcattggctacttcagccgataagggggcagtaagagacaaatcgaagttgggtggatga

SEQ ID NO: 159 - DNA, 1476 bp, Artificial Sequence
  E. coli EcilvCcoScQ110V nucleotide sequence
atggccaactattttaacacattaaatttgagacaacaattggctcaactgggtaagtgcagatttatgggaagggacgagtttgctgatggtgcttcttatctgcaaggaaagaaagtagtaattgttggctgcggtgctcagggtctaaaccaaggtttaaacatgagagattcaggtctggatatttcgtatgcattgaggaaagaggcaattgcagaaaagagggcctcctggcgtaaagcgacggaaaatgggttcaaagttggtacttacgaagaactgatccctcaggcagatttagtgattaacctaacaccagataaggttcactcagacgtagtaagaacagttcaaccgctgatgaaggatggggcagctttaggttactctcatggctttaatatcgttgaagtgggcgagcagatcagaaaagatataacagtcgtaatggttgcaccaaagtgcccaggtacggaagtcagagaggagtacaagaggggttttggtgtacctacattgatcgccgtacatcctgaaaatgaccccaaaggtgaaggtatggcaattgcgaaggcatgggcagccgcaaccggaggtcatagagcgggtgtgttagagagttctttcgtagctgaggtcaagagtgacttaatgggtgaacaaaccattctgtgcggaatgttgcaggcagggtctttactatgctttgataaattggtcgaagagggtacagatcctgcctatgctgaaaagttgatacaatttggttgggagacaatcaccgaggcacttaaacaaggtggcataacattgatgatggatagactttcaaatccggccaagctaagagcctacgccttatctgagcaactaaaagagatcatggcaccattattccaaaagcacatggacgatattatctccggtgagttttcctcaggaatgatggcagattgggcaaacgatgataaaaagttattgacgtggagagaagaaaccggcaagacggcattcgagacagccccacaatacgaaggtaaaattggtgaacaagaatactttgataagggagtattgatgatagctatggtgaaggcaggggtagaacttgcattcgaaactatggttgactccggtatcattgaagaatctgcatactatgagtctttgcatgaattgcctttgatagcaaatactattgcaagaaaaagactttacgagatgaatgttgtcatatcagacactgcagaatatggtaattacttatttagctacgcatgtgtcccgttgttaaagcccttcatggccgagttacaacctggtgatttggggaaggctattccggaaggagcggttgacaatggccaactgagagacgtaaatgaagctattcgttcacatgctatagaacaggtgggtaaaaagctgagaggatatatgaccgatatgaaaagaattgcagtggcaggatga

SEQ ID NO: 160 - DNA, 1701 bp, Saccharomyces cerevisiae
atgaagaagctcaacaagtactcgtatatcatcactgaacctaagggccaaggtgcgtcccaggccatgctttatgccaccggtttcaagaaggaagatttcaagaagcctcaagtcggggttggttcctgttggtggtccggtaacccatgtaacatgcatctattggacttgaataacagatgttctcaatccattgaaaaagcgggtttgaaagctatgcagttcaacaccatcggtgtttcagacggtatctctatgggtactaaaggtatgagatactcgttacaaagtagagaaatcattgcagactcctttgaaaccatcatgatggcacaacactacgatgctaacatcgccatcccatcatgtgacaaaaacatgcccggtgtcatgatggccatgggtagacataacagaccttccatcatggtatatggtggtactatcttgcccggtcatccaacatgtggttcttcgaagatctctaaaaacatcgatatcgtctctgcgttccaatcctacggtgaatatatttccaagcaattcactgaagaagaaagagaagatgttgtggaacatgcatgcccaggtcctggttcttgtggtggtatgtatactgccaacacaatggcttctgccgctgaagtgctaggtttgaccattccaaactcctcttccttcccagccgtttccaaggagaagttagctgagtgtgacaacattggtgaatacatcaagaagacaatggaattgggtattttacctcgtgatatcctcacaaaagaggcttttgaaaacgccattacttatgtcgttgcaaccggtgggtccactaatgctgttttgcatttggtggctgttgctcactctgcgggtgtcaagttgtcaccagatgatttccaaagaatcagtgatactacaccattgatcggtgacttcaaaccttctggtaaatacgtcatggccgatttgattaacgttggtggtacccaatctgtgattaagtatctatatgaaaacaacatgttgcacggtaacacaatgactgttaccggtgacactttggcagaacgtgcaaagaaagcaccaagcctacctgaaggacaagagattattaagccactctcccacccaatcaaggccaacggtcacttgcaaattctgtacggttcattggcaccaggtggagctgtgggtaaaattaccggtaaggaaggtacttacttcaagggtagagcacgtgtgttcgaagaggaaggtgcctttattgaagccttggaaagaggtgaaatcaagaagggtgaaaaaaccgttgttgttatcagatatgaaggtccaagaggtgcaccaggtatgcctgaaatgctaaagccttcctctgctctgatgggttacggtttgggtaaagatgttgcattgttgactgatggtagattctctggtggttctcacgggttcttaatcggccacattgttcccgaagccgctgaaggtggtcctatcgggttggtcagagacggcgatgagattatcattgatgctgataataacaagattgacctattagtctctgataaggaaatggctcaacgtaaacaaagttgggttgcacctccacctcgttacacaagaggtactctatccaagtatgctaagttggtttccaacgcttccaacggttgtgttttagatgcttga

SEQ ID NO: 161 - DNA, 771 bp, Drosophila melanogaster
atgtcgtttactttgaccaacaagaacgtgattttcgttgccggtctgggaggcattggtctggacaccagcaaggagctgctcaagcgcgatctgaagaacctggtgatcctcgaccgcattgagaacccggctgccattgccgagctgaaggcaatcaatccaaaggtgaccgtcaccttctacccctatgatgtgaccgtgcccattgccgagaccaccaagctgctgaagaccatcttcgcccagctgaagaccgtcgatgtcctgatcaacggagctggtatcctggacgatcaccagatcgagcgcaccattgccgtcaactacactggcctggtcaacaccacgacggccattctggacttctgggacaagcgcaagggcggtcccggtggtatcatctgcaacattggatccgtcactggattcaatgccatctaccaggtgcccgtctactccggcaccaaggccgccgtggtcaacttcaccagctccctggcgaaactggcccccattaccggcgtgacggcttacactgtgaaccccggcatcacccgcaccaccctggtgcacacgttcaactcctggttggatgttgagcctcaggttgccgagaagctcctggctcatcccacccagccctcgttggcctgcgccgagaacttcgtcaaggctatcgagctgaaccagaacggagccatctggaaactggacttgggcaccctggaggccatccagtggaccaagcactgggactccggcatctaa

SEQ ID NO: 162 - DNA, 1494 bp, Artificial Sequence
  E. coli EcilvCcoScP2D1-A1-HIS6 nucleotide sequence
atggccaactattttaacacattaaatttgagacaacaattggctcaactgggtaagtgcagatttatgggaagggacgagtttgctgatggtgcttcttatctgcaaggaaagaaagtagtaattgttggctgcggtgctcagggtctaaaccaaggtttaaacatgagagattcaggtctggatatttcgtatgcattgaggaaagagtctattgcagaaaaggatgccgattggcgtaaagcgacggaaaatgggttcaaagttggtacttacgaagaactgatccctcaggcagatttagtgattaacctaacaccagataaggttcactcagacgtagtaagaacagttcaaccgctgatgaaggatggggcagctttaggttactctcatggctttaatatcgttgaagtgggcgagcagatcagaaaagatataacagtcgtaatggttgcaccaaagtgcccaggtacggaagtcagagaggagtacaagaggggttttggtgtacctacattgatcgccgtacatcctgaaaatgaccccaaaggtgaaggtatggcaattgcgaaggcatgggcagccgcaaccggaggtcatagagcgggtgtgttagagagttctttcgtagctgaggtcaagagtgacttaatgggtgaacaaaccattctgtgcggaatgttgcaggcagggtctttactatgctttgataaattggtcgaagagggtacagatcctgcctatgctgaaaagttgatacaatttggttgggagacaatcaccgaggcacttaaacaaggtggcataacattgatgatggatagactttcaaatccggccaagctaagagcctacgccttatctgagcaactaaaagagatcatggcaccattattccaaaagcacatggacgatattatctccggtgagttttcctcaggaatgatggcagattgggcaaacgatgataaaaagttattgacgtggagagaagaaaccggcaagacggcattcgagacagccccacaatacgaaggtaaaattggtgaacaagaatactttgataagggagtattgatgatagctatggtgaaggcaggggtagaacttgcattcgaaactatggttgactccggtatcattgaagaatctgcatactatgagtctttgcatgaattgcctttgatagcaaatactattgcaagaaaaagactttacgagatgaatgttgtcatatcagacactgcagaatatggtaattacttatttagctacgcatgtgtcccgttgttaaagcccttcatggccgagttacaacctggtgatttggggaaggctattccggaaggagcggttgacaatggccaactgagagacgtaaatgaagctattcgttcacatgctatagaacaggtgggtaaaaagctgagaggatatatgaccgatatgaaaagaattgcagtggcaggacaccaccaccaccaccactga

SEQ ID NO: 163 - DNA, 32 bp, Artificial Sequence
  Primer #394
caaccactgcagccagcagttaaagcaccaac

SEQ ID NO: 164 - DNA, 20 bp, Artificial Sequence
  Primer #562
ttaagcggatctgcctactc

SEQ ID NO: 165 - DNA, 22 bp, Artificial Sequence
  Primer #837
atcatttgtaaactggaacagc

1. A recombinant eukaryotic microorganism capable of producing isobutanol from a carbon source, said recombinant eukaryotic microorganism comprising an isobutanol producing metabolic pathway, wherein said metabolic pathway comprises enzymes catalyzing the conversions (a-e):
a) pyruvate to acetolactate;
b) acetolactate to dihydroxyisovalerate;
c) dihydroxy isovalerate to ketoisovalerate;
d) ketoisovalerate to isobutyraldehyde; and
e) isobutyraldehyde to isobutanol,
and wherein at least one of the conversions (a-e) occurs in the mitochondria.

2. The recombinant eukaryotic microorganism of claim 1, wherein the at least one conversion is (a) pyruvate to acetolactate.

3. The recombinant eukaryotic microorganism of claim 1, wherein at least two of the conversions (a-e) occur in the mitochondria.

4. The recombinant eukaryotic microorganism of claim 1, wherein at least three of the conversions (a-e) occur in the mitochondria.

5. The recombinant eukaryotic microorganism of claim 1, wherein at least four of the conversions (a-e) occur in the mitochondria.

6. The recombinant eukaryotic microorganism of claim 1, wherein all five of the conversions (a-e) occur in the mitochondria.

7. A recombinant eukaryotic microorganism capable of producing isobutanol from a carbon source, said recombinant eukaryotic microorganism comprising an isobutanol producing metabolic pathway, wherein said metabolic pathway comprises at least one of the enzymes selected from (a-f):
a) acetolactate synthase (ALS);
b) ketolacid reductoisomerase (KARI);
c) dihydroxy acid dehydratase (DHAD);
d) ketoisovalerate decarboxylase (KIVD);
e) alcohol dehydrogenase (ADH); and a
f) branched chain amino acid aminotransferase,
and wherein at least one of the enzymes (a-f) is overexpressed and targeted to the mitochondria.

8. The recombinant eukaryotic microorganism of claim 7, wherein the at least one enzyme is ALS.

9. The recombinant eukaryotic microorganism of claim 7, wherein at least two of the enzymes (a-f) are overexpressed and targeted to the mitochondria.

10. The recombinant eukaryotic microorganism of claim 7, wherein at least three of the enzymes (a-f) are overexpressed and targeted to the mitochondria.

11. The recombinant eukaryotic microorganism of claim 7, wherein at least four of the enzymes (a-f) are overexpressed and targeted to the mitochondria.

12. The recombinant eukaryotic microorganism of claim 7, wherein five of the enzymes (a-f) are overexpressed and targeted to the mitochondria.

13. The recombinant eukaryotic microorganism of claim 1, wherein said recombinant eukaryotic microorganism produces isobutanol at a specific productivity of at least about 0.003 g/L/h/OD.

14. The recombinant eukaryotic microorganism of claim 1, wherein said recombinant eukaryotic microorganism produces isobutanol at a titer of at least about 2.7 g/L.

15. The recombinant eukaryotic microorganism of claim 1, wherein said recombinant eukaryotic microorganism produces isobutanol at a total titer of at least about 21 g/L.

16.-17. (canceled)

18. The recombinant eukaryotic microorganism of claim 1, wherein said recombinant eukaryotic microorganism overexpresses BAT1 or BAT2.

19.-25. (canceled)

26. The recombinant eukaryotic microorganism of claim 1, wherein said recombinant eukaryotic microorganism is engineered to overexpress one or more genes selected from PCK1, PYC1, PYC2, MDH2, DIC1 and MAE1.

27. (canceled)

28. The recombinant eukaryotic microorganism of claim 1, wherein said recombinant eukaryotic microorganism is further engineered to express a transhydrogenase.

29. The recombinant eukaryotic microorganism of claim 28, wherein said transhydrogenase is localized to the cytoplasmic membrane.

30. The recombinant eukaryotic microorganism of claim 28, wherein said transhydrogenase is localized to the mitochondrial membrane.

31. The recombinant eukaryotic microorganism of claim 28, wherein said transhydrogenase is localized to the cytoplasmic membrane and the mitochondrial membrane.

32. The recombinant eukaryotic microorganism of claim 28, wherein said transhydrogenase is a mammalian transhydrogenase.

33. The recombinant eukaryotic microorganism of claim 28, wherein said transhydrogenase is a bacterial membrane bound transhydrogenase.

34. The recombinant eukaryotic microorganism of claim 28, wherein said transhydrogenase is a fungal transhydrogenase.

35. The recombinant eukaryotic microorganism of claim 34, wherein said fungal transhydrogenase is a transhydrogenase derived from Neurospora crassa.

36.-40. (canceled)

41. The recombinant eukaryotic microorganism of claim 1, wherein said recombinant eukaryotic microorganism is engineered to have reduced pyruvate decarboxylase (PDC) activity.

42.-43. (canceled)

44. The recombinant eukaryotic microorganism of claim 1, wherein said recombinant eukaryotic microorganism is engineered to have reduced glycerol-3-phosphate dehydrogenase (GPD) activity.

45.-53. (canceled)

54. The recombinant eukaryotic microorganism of claim 1, wherein said recombinant eukaryotic microorganism is a yeast recombinant microorganism.

55.-69. (canceled)

70. A method of producing isobutanol, comprising the steps of:
(a) providing a recombinant eukaryotic microorganism according to claim 1: and
(b) cultivating said recombinant eukaryotic microorganism in a culture medium containing a feedstock providing a carbon source until the isobutanol is produced.

71.-72. (canceled)
